(19) United States
(12) Patent Application Publication
(10) Pub. No.: US 2007/0281899 A1
(43) Pub. Date: Dec. 6, 2007

(54) COMPOSITIONS AND METHODS FOR INHIBITING EXPRESSION OF Eg5 GENE

(76) Inventors: David Bumcrot, Belmont, MA (US); Pamela Tan, Kulmbach (DE); Hans-Peter Vornlocher, Bayreuth (DE); Anke Geick, Bayreuth (DE)

Correspondence Address: FISH & RICHARDSON PC, P.O. BOX 1022, MINNEAPOLIS, MN, 55440-1022, US

(21) Appl. No.: 11/694,215

(22) Filed: Mar. 30, 2007

Related U.S. Application Data
(60) Provisional application No. 60/787,762, filed on Mar. 31, 2006.
(60) Provisional application No. 60/870,259, filed on Dec. 15, 2006.

(51) Int. Cl. A61K 48/00; C07H 21/02; C12N 15/09

(52) U.S. Cl. 514/44; 536/23.1; 435/320.1; 435/325

(57) ABSTRACT

The invention relates to a double-stranded ribonucleic acid (dsRNA) for inhibiting the expression of the Eg5 gene (Eg5 gene), comprising an antisense strand having a nucleotide sequence which is less that 30 nucleotides in length, generally 19-25 nucleotides in length, and which is substantially complementary to at least a part of the Eg5 gene. The invention also relates to a pharmaceutical composition comprising the dsRNA together with a pharmaceutically acceptable carrier; methods for treating diseases caused by Eg5 expression and the expression of the Eg5 gene using the pharmaceutical composition; and methods for inhibiting the expression of the Eg5 gene in a cell.

### RELATED APPLICATIONS

[0001] This application claims the benefit of U.S. Provisional Application No. 60/787,762, filed Mar. 31, 2006, and U.S. Provisional Application No. 60/870/259, filed Dec. 15, 2006. Both prior applications are incorporated herein by reference in their entirety.

### FIELD OF THE INVENTION

[0002] This invention relates to double-stranded ribonucleic acid (dsRNA), and its use in mediating RNA interference to inhibit the expression of the Eg5 gene and the use of the dsRNA to treat pathological processes mediated by Eg5 expression, such as cancer, alone or in combination with a dsRNA targeting vacular endothelian growth factor (VEGF).

### BACKGROUND OF THE INVENTION

[0003] The maintenance of cell populations within an organism is governed by the cellular processes of cell division and programmed cell death. Within normal cells, the cellular events associated with the initiation and completion of each process is highly regulated. In proliferative disease such as cancer, one or both of these processes may be perturbed. For example, a cancer cell may have lost its regulation (checkpoint control) of the cell division cycle through either the overexpression of a positive regulator or the loss of a negative regulator, perhaps by mutation.

[0004] Alternatively, a cancer cell may have lost the ability to undergo programmed cell death through the overexpression of a negative regulator. Hence, there is a need to develop new chemotherapeutic drugs that will restore the processes of checkpoint control and programmed cell death to cancerous cells.

[0005] One approach to the treatment of human cancers is to target a protein that is essential for cell cycle progression. In order for the cell cycle to proceed from one phase to the next, certain prerequisite events must be completed. There are checkpoints within the cell cycle that enforce the proper order of events and phases. One such checkpoint is the spindle checkpoint that occurs during the metaphase stage of mitosis. Small molecules that target proteins with essential functions in mitosis may initiate the spindle checkpoint to arrest cells in mitosis. Of the small molecules that arrest cells in mitosis, those which display anti-tumor activity in the clinic also include apoptosis, the morphological changes associated with programmed cell death. An effective chemotherapeutic for the treatment of cancer may thus be one which induces checkpoint control and programmed cell death. Unfortunately, there are few compounds available for controlling these processes within the cell. Most compounds known to cause mitotic arrest and apoptosis act as tubulin binding agents. These compounds alter the dynamic instability of microtubules and indirectly alter the function/structure of the mitotic spindle thereby causing mitotic arrest. Because most of these compounds specifically target the tubulin protein which is a component of all microtubules, they may also affect one or more of the numerous normal cellular processes in which microtubules, they may also affect one or more of the numerous normal cellular processes in which microtubules have a role. Hence, there is also a need for small molecules that more specifically target proteins associated with proliferating cells.

[0006] Eg5 is one of several kinesin-like motor proteins that are localized to the mitotic spindle and known to be required for formation and/or function of the bipolar mitotic spindle. Recently, there was a report of a small molecule that disturbs bipolarity of the mitotic spindle (Mayer, T. U. et. al. 1999. Science 286(5441) 971-4, herein incorporated by reference). More specifically, the small molecule induced the formation of an aberrant mitotic spindle wherein a monoastral array of microtubules emanated from a central pair of centrosomes, with chromosomes attached to the distal ends of the microtubules. The small molecule was dubbed “monastrol” after the monoastral array. This monoastral array phenotype had been previously observed in mitotic cells that were immunodepleted of the Eg5 motor protein. This distinctive monoastral array phenotype facilitated identification of monastrol as a potential inhibitor of Eg5. Indeed, monastrol was further shown to inhibit the Eg5 motor-driven motility of microtubules in an in vitro assay. The Eg5 inhibitor monastrol had no apparent effect upon the related kinesin motor or upon the motor(s) responsible for golgi apparatus movement within the cell. Cells that display the monoastral array phenotype either through immunodepletion of Eg5 or monastrol inhibition of Eg5 arrest in M-phase of the cell cycle. However, the mitotic arrest induced by either immunodepletion or inhibition of Eg5 is transient (Kapoor, T. N., 2000, J Cell Biol 150(5) 975-80). Both the monoastral array phenotype and the cell cycle arrest in mitosis induced by monastrol are reversible. Cells recover to form a normal bipolar mitotic spindle, to complete mitosis and to proceed through the cell cycle and normal cell proliferation. These data suggest that a small molecule inhibitor of Eg5 which induced a transient mitotic arrest may not be effective for the treatment of cancer cell proliferation. Nonetheless, the discovery that monastrol causes mitotic arrest is intriguing and hence there is a need to further study and identify compounds which can be used to modulate the Eg5 motor protein in a manner that would be effective in the treatment of human cancers. There is also a need to explore the use of these compounds in combination with other antineoplastic agents.

[0007] VEGF (also known as vascular permeability factor, VPF) is a multifunctional cytokine that stimulates angiogenesis, epithelial cell proliferation, and endothelial cell survival. VEGF can be produced by a wide variety of tissues, and its overexpression or aberrant expression can result in a variety disorders, including cancers and retinal disorders such as age-related macular degeneration and other angiogenic disorders.

[0008] Recently, double-stranded RNA molecules (dsRNA) have been shown to block gene expression in a highly conserved regulatory mechanism known as RNA interference (RNAi)). WO 99/32619 (Fire et al.) discloses the use of a dsRNA of at least 25 nucleotides in length to inhibit the expression of genes in C. elegans. dsRNA has also been shown to degrade target RNA in other organisms, including plants (see, e.g., WO 99/53050, Waterhouse et al., and WO 99/61631, Heifetz et al.), (see e.g., Yang, D., et al., Curr. Biol. (2000) 10:1191-1200), and mammals (see WO 00/44895, Limmer; and DE 101 00 586.5, Kreutzer et al.). This natural mechanism has now become the focus for the development of a new class of pharmaceutical agents for treating disorders that are caused by the aberrant or unwanted regulation of a gene.

[0009] Despite significant advances in the field of RNAi and advances in the treatment of pathological processes mediated by Eg5 expression, there remains a need for an agent that can selectively and efficiently silence the Eg5 gene using the cell's own RNAi machinery that has both high biological activity and in vivo stability, and that can effectively inhibit expression of a target Eg5 gene for use in treating pathological processes mediated by Eg5 expression.

### SUMMARY OF THE INVENTION

[0010] The invention provides double-stranded ribonucleic acid (dsRNA), as well as compositions and methods for inhibiting the expression of the Eg5 gene in a cell or mammal using such dsRNA, alone or in combination with a dsRNA targeting VEGF. The invention also provides compositions and methods for treating pathological conditions and diseases caused by the expression of the Eg5 gene, such as in cancer. The dsRNA of the invention comprises an RNA strand (the antisense strand) having a region which is less than 30 nucleotides in length, generally 19-24 nucleotides in length, and is substantially complementary to at least part of an mRNA transcript of the Eg5 gene.

[0011] In one embodiment, the invention provides double-stranded ribonucleic acid (dsRNA) molecules for inhibiting the expression of the Eg5 gene. The dsRNA comprises at least two sequences that are complementary to each other. The dsRNA comprises a sense strand comprising a first sequence and an antisense strand comprising a second sequence. The antisense strand comprises a nucleotide sequence which is substantially complementary to at least part of an mRNA encoding Eg5, and the region of complementarity is less than 30 nucleotides in length, generally 19-24 nucleotides in length. The dsRNA, upon contacting with a cell expressing the Eg5, inhibits the expression of the Eg5 gene by at least 40%.

[0012] For example, the dsRNA molecules of the invention can be comprised of a first sequence of the dsRNA that is selected from the group consisting of the sense sequences of Tables 1-3 and the second sequence is selected from the group consisting of the antisense sequences of Tables 1-3. The dsRNA molecules of the invention can be comprised of naturally occurring nucleotides or can be comprised of at least one modified nucleotide, such as a 2′-O-methyl modified nucleotide, a nucleotide comprising a 5′-phosphorothioate group, and a terminal nucleotide linked to a cholesteryl derivative. Alternatively, the modified nucleotide may be chosen from the group of: a 2′-deoxy-2′-fluoro modified nucleotide, a 2′-deoxy-modified nucleotide, a locked nucleotide, an abasic nucleotide, 2′-amino-modified nucleotide, 2′-alkyl-modified nucleotide, morpholino nucleotide, a phosphoramidate, and a non-natural base comprising nucleotide. Generally, such modified sequence will be based on a first sequence of said dsRNA selected from the group consisting of the sense sequences of Tables 1-3 and a second sequence selected from the group consisting of the antisense sequences of Tables 1-3.

[0013] In another embodiment, the invention provides a cell comprising one of the dsRNAs of the invention. The cell is generally a mammalian cell, such as a human cell.

[0014] In another embodiment, the invention provides a pharmaceutical composition for inhibiting the expression of the Eg5 gene in an organism, generally a human subject, comprising one or more of the dsRNA of the invention and a pharmaceutically acceptable carrier or delivery vehicle.

[0015] In another embodiment, the invention provides a method for inhibiting the expression of the Eg5 gene in a cell, comprising the following steps:
[0016] (a) introducing into the cell a double-stranded ribonucleic acid (dsRNA), wherein the dsRNA comprises at least two sequences that are complementary to each other. The dsRNA comprises a sense strand comprising a first sequence and an antisense strand comprising a second sequence. The antisense strand comprises a region of complementarity which is substantially complementary to at least a part of a mRNA encoding Eg5, and wherein the region of complementarity is less than 30 nucleotides in length, generally 19-24 nucleotides in length, and wherein the dsRNA, upon contact with a cell expressing the Eg5, inhibits expression of the Eg5 gene by at least 40%; and
[0017] (b) maintaining the cell produced in step (a) for a time sufficient to obtain degradation of the mRNA transcript of the Eg5 gene, thereby inhibiting expression of the Eg5 gene in the cell.

[0018] In another embodiment, the invention provides methods for treating, preventing or managing pathological processes mediated by Eg5 expression, e.g. cancer, comprising administering to a patient in need of such treatment, prevention or management a therapeutically or prophylactically effective amount of one or more of the dsRNAs of the invention.

[0019] In another embodiment, the invention provides vectors for inhibiting the expression of the Eg5 gene in a cell, comprising a regulatory sequence operable linked to a nucleotide sequence that encodes at least one strand of one of the dsRNA of the invention.

[0020] In another embodiment, the invention provides a cell comprising a vector for inhibiting the expression of the Eg5 gene in a cell. The vector comprises a regulatory sequence operably linked to a nucleotide sequence that encodes at least one strand of one of the dsRNA of the invention.

[0021] In a further embodiment, the invention provides the Eg5 dsRNA and the uses thereof as described above in combination with a second dsRNA targeting the VEGF mRNA. A combination of a dsRNA targeting Eg5 and a second dsRNA targeting VEGF provides complementary and synergiatic activity for treating hyperproliferative discords, particulary hepatic carcinoma.

### BRIEF DESCRIPTION OF THE FIGURES

[0022] No Figures are presented.

### DETAILED DESCRIPTION OF THE INVENTION

[0023] The invention provides double-stranded ribonucleic acid (dsRNA), as well as compositions and methods for inhibiting the expression of the Eg5 gene in a cell or mammal using the dsRNA. The invention also provides compositions and methods for treating pathological conditions and diseases in a mammal caused by the expression of the Eg5 gene using dsRNA. dsRNA directs the sequence-specific degradation of mRNA through a process known as RNA interference (RNAi). The invention further provides this dsRNA in combination with a second dsRNA that inhibits the expression of the VEGF gene.

[0024] The dsRNAs of the invention comprises an RNA strand (the antisense strand) having a region which is less than 30 nucleotides in length, generally 19-24 nucleotides in length, and is substantially complementary to at least part of an mRNA transcript of the Eg5 gene. The use of these dsRNAs enables the targeted degradation of mRNAs of genes that are implicated in replication and or maintenance of cancer cells in mammals. Using cell-based and animal assays, the present invention have demonstrated that very low dosages of these dsRNA can specifically and efficiently mediate RNAi, resulting in significant inhibition of expression of the Eg5 gene. Thus, the methods and compositions of the invention comprising these dsRNAs are useful for treating pathological processes mediated by EG5 expression, e.g. cancer, by targeting a gene involved in mitotic division.

[0025] The following detailed description discloses how to make and use the dsRNA and compositions containing dsRNA to inhibit the expression of the Eg5 gene, as well as compositions and methods for treating diseases and disorders caused by the expression of Eg5, such as cancer, alone or in combination with a second dsRNA targeting the VEGF gene. The pharmaceutical compositions of the invention comprise a dsRNA having an antisense strand comprising a region of complementarity which is less than 30 nucleotides in length, generally 19-24 nucleotides in length, and is substantially complementary to at least part of an RNA transcript of the Eg5 gene, together with a pharmaceutically acceptable carrier. As discussed above, such compositions can further include a second dsRNA targeting VEGF.

[0026] Accordingly, certain aspects of the invention provide pharmaceutical compositions comprising the dsRNA of the invention together with a pharmaceutically acceptable carrier, methods of using the compositions to inhibit expression of the Eg5 gene, and methods of using the pharmaceutical compositions to treat diseases caused by expression of the Eg5 gene. The invention further provides the above pharmaceutical compositions further containing a second dsRNA designed to inhibit the expression of VEGF.

I. Definitions

[0027] For convenience, the meaning of certain terms and phrases used in the specification, examples, and appended claims, are provided below. If there is an apparent discrepancy between the usage of a term in other parts of this specification and its definition provided in this section, the definition in this section shall prevail.

[0028] “G,” “C,” “A” and “U” each generally stand for a nucleotide that contains guanine, cytosine, adenine, and uracil as a base, respectively. However, it will be understood that the term “ribonucleotide” or “nucleotide” can also refer to a modified nucleotide, as further detailed below, or a surrogate replacement moiety. The skilled person is well aware that guanine, cytosine, adenine, and uracil may be replaced by other moieties without substantially altering the base pairing properties of an oligonucleotide comprising a nucleotide bearing such replacement moiety. For example, without limitation, a nucleotide comprising inosine as its base may base pair with nucleotides containing adenine, cytosine, or uracil. Hence, nucleotides containing uracil, guanine, or adenine may be replaced in the nucleotide sequences of the invention by a nucleotide containing, for example, inosine. Sequences comprising such replacement moieties are embodiments of the invention.

[0029] As used herein, “Eg5” refers to the human kinesine family member 11, which is also known in KIF11, Eg5, KNSL1 or TRIP5. Eg5 sequence can be found as NCBI GeneID:3832, HGNC ID: HGNC:6388 and RefSeq ID number NM_{—}004523.

[0030] As used herein, “target sequence” refers to a contiguous portion of the nucleotide sequence of an mRNA molecule formed during the transcription of the Eg5 gene, including mRNA that is a product of RNA processing of a primary transcription product.

[0031] As used hereing, VEGF, also known as vascular permeability factor, is an angiogenic growth factor. VEGF is a homodimeric 45 kDa glycoprotein that exists in at least three different isoforms. VEGF isoforms are expressed in endothelial cells. The VEGF gene contains 8 exons that express a 189-amino acid portein isoform. A 165-amino acid isoform lacks the residues encoded by exon 6, whereas a 121-amino acid isoform lacks the residues encoded by exons 6 and 7, VEGF145 is an isoform predicted to contain 145 amino acids and to lack exon 7. VEGF can act on endothelial cells by binding to an endothelial tyrosine kinase receptor, such as Flt-1 (VEGFR-1) or KDR/flk-1 (VEGFR-2). VEGFR-2 is expressed in endothelial cells and is involved in endothelial cell differentiation and vasculogenesis. A third receptor, VEGFR-3 has been implicated in lymphogenesis.

[0032] The various isoforms have different biologic activities and clinical implications. For example, VEGF145 includes angiogenesis and like VEGF189 (but unlike VEGF165) VEGF145 binds efficiently to the extracellular matrix by a mechanism that is not dependent on extracellular matrix-associated heparin sulfates. VEGF displays activity as an endothelial cell mitogen and chemoattractant in vitro and induces vascular permeability and angiogenesis in vivo. VEGF is secreted by a wide variety of cancer cell types and promotes the growth of tumors by inducing the development of tumor-associated vasculature. Inhibition of VEGF function has been shown to limit both the growth of primary experimental tumors as well as the incidence of metastases in immunocompromised mice. Various dsRNAs directed to VEGF are described in co-pending U.S. Ser. Nos. 11/078,073 and 11/340,080, herein incorporated by reference).

[0033] As used herein, the term “strand comprising a sequence” refers to an oligonucleotide comprising a chain of nucleotides that is described by the sequence referred to using the standard nucleotide nomenclature.

[0034] As used herein, and unless otherwise indicated, the term “complementary,” when used to describe a first nucleotide sequence in relation to a second nucleotide sequence, refers to the ability of an oligonucleotide or polynucleotide comprising the first nucleotide sequence to hybridize and form a duplex structure under certain conditions with an oligonucleotide or polynucleotide comprising the second nucleotide sequence, as will be understood by the skilled person. Such conditions can, for example, be stringent conditions, where stringent conditions may include: 400 mM NaCl, 40 mM PIPES pH 6.4, 1 mM EDTA, 50° C. or 70° C. for 12-16 hours followed by washing. Other conditions, such as physiologically relevant conditions as may be encountered inside an organism, can apply. The skilled person will be able to determine the set of conditions most appropriate for a test of complementarity of two sequences in accordance with the ultimate application of the hybridized nucleotides.

[0035] This includes base-pairing of the oligonucleotide or polynucleotide comprising the first nucleotide sequence to the oligonucleotide or polynucleotide comprising the second nucleotide sequence over the entire length of the first and second nucleotide sequence. Such sequences can be referred to as “fully complementary” with respect to each other herein. However, where a first sequence is referred to as “substantially complementary” with respect to a second sequence herein, the two-sequences can be fully complementary, or they may form one or more, but generally not more than 4, 3 or 2 mismatched base pairs upon hybridization, while retaining the ability to hybridize under the conditions most relevant to their ultimate application. However, where two oligonucleotides are designed to form, upon hybridization, one or more single stranded overhangs, such overhangs shall not be regarded as mismatches with regard to the determination of complementarity. For example, a dsRNA comprising one oligonucleotide 21 nucleotides in length and another oligonucleotide 23 nucleotides in length, wherein the longer oligonucleotide comprises a sequence of 21 nucleotides that is fully complementary to the shorter oligonucleotide, may yet be referred to as “fully complementary” for the purposes of the invention.

[0036] “Complementary” sequences, as used herein, may also include, or be formed entirely from, non-Watson-Crick base pairs and/or base pairs formed from non-natural and modified nucleotides, in as far as the above requirements with respect to their ability to hybridize are fulfilled.

[0037] The terms “complementary”, “fully complementary” and “substantially complementary” herein may be used with respect to the base matching between the sense strand and the antisense strand of a dsRNA, or between the antisense strand of a dsRNA and a target sequence, as will be understood from the context of their use.

[0038] As used herein, a polynucleotide which is “substantially complementary to at least part of” a messenger RNA (mRNA) refers to a polynucleotide which is substantially complementary to a contiguous portion of the mRNA of interest (e.g., encoding Eg5). For example, a polynucleotide is complementary to at least a part of a Eg5 mRNA if the sequence is substantially complementary to a non-interrupted portion of a mRNA encoding Eg5.

[0039] The term “double-stranded RNA” or “dsRNA”, as used herein, refers to a complex of ribonucleic acid molecules, having a duplex structure comprising two anti-parallel and substantially complementary, as defined above, nucleic acid strands,. The two strands forming the duplex structure may be different portions of one larger RNA molecule, or they may be separate RNA molecules. Where the two strands are part of one larger molecule, and therefore are connected by an uninterrupted chain of nucleotides between the 3′-end of one strand and the 5′end of the respective other strand forming the duplex structure, the connecting RNA chain is referred to as a “hairpin loop”. Where the two strands are connected covalently by means other than an uninterrupted chain of nucleotides between the 3′-end of one strand and the 5′end of the respective other strand forming the duplex structure, the connecting structure is referred to as a “linker”. The RNA strands may have the same or a different number of nucleotides. The maximum number of base pairs is the number of nucleotides in the shortest strand of the dsRNA minus any overhangs that are present in the duplex. In addition to the duplex structure, a dsRNA may comprise one or more nucleotide overhangs.

[0040] As used herein, a “nucleotide overhang” refers to the unpaired nucleotide or nucleotides that protrude from the duplex structure of a dsRNA when a 3′-end of one strand of the dsRNA extends beyond the 5′-end of the other strand, or vice versa. “Blunt” or “blunt end” means that there are no unpaired nucleotides at that end of the dsRNA, i.e., no nucleotide overhang. A “blunt ended” dsRNA is a dsRNA that is double-stranded over its entire length, i.e., no nucleotide overhang at either end of the molecule.

[0041] The term “antisense strand” refers to the strand of a dsRNA which includes a region that is substantially complementary to a target sequence. As used herein, the term “region of complementarity” refers to the region on the antisense strand that is substantially complementary to a sequence, for example a target sequence, as defined herein. Where the region of complementarity is not fully complementary to the target sequence, the mismatches are most tolerated in the terminal regions and, if present, are generally in a terminal region or regions, e.g., within 6, 5, 4, 3, or 2 nucleotides of the 5′ and/or 3′ terminus.

[0042] The term “sense strand,” as used herein, refers to the strand of a dsRNA that includes a region that is substantially complementary to a region of the antisense strand.

[0043] “Introducing into a cell”, when referring to a dsRNA, means facilitating uptake or absorption into the cell, as in understood by those skilled in the art. Absorption or uptake of dsRNA can occur through unaided diffusive or active cellular processes, or by auxiliary agents or devices. The meaning of this term is not limited to cells in vitro; a dsRNA may also be “introduced into a cell”, wherein the cell is part of a living organism. In such instance, introduction into the cell will include the delivery to the organism. For example, for in vivo delivery, dsRNA can be injected into a tissue site or administered systemically. In vitro introduction into a cell includes methods known in the art such as electroporation and lipofection.

[0044] The terms “silence” and “inhibit the expression of”, in as far as they refer to the Eg5 gene, herein refer to the at least partial suppression of the expression of the Eg5 gene, as manifested by a reduction of the amount of mRNA transcribed from the Eg5 gene which may be isolated from a first cell or group of cells in which the Eg5 gene is transcribed and which has or have been treated such that the expression of the Eg5 gene is inhibited, as compared to a second cell or group of cells substantially identical to the first cell or group of cells but which has or have not been so treated (control cells). The degree of inhibition is usually expressed in terms of

$$\frac{( mRNA in control cells ) - ( mRNA in treated cells )}{( mRNA in control cells )} \cdot 100 \%$$

[0045] Alternatively, the degree of inhibition may be given in terms of a reduction of a parameter that is functionally linked to Eg5 gene transcription, e.g. the amount of protein encoded by the Eg5 gene which is secreted by a cell, or the number of cells displaying a certain phenotype, e.g. apoptosis. In principle, Eg5 gene silencing may be determined in any cell expressing the target, either constitutively or by genomic engineering, and by any appropriate assay. However, when a reference is needed in order to determine whether a given dsRNA inhibits the expression of the Eg5 gene by a certain degree and therefore is encompassed by the instant invention, the assay provided in the Examples below shall serve as such reference.

[0046] For example, in certain instances, expression of the Eg5 gene (or VEGF gene) is suppressed by at least about 20%, 25%, 35%, or 50% by administration of the double-stranded oligonucleotide of the invention. In some embodiment, the Eg5 gene is suppressed by at least about 60%, 70%, or 80% by administration of the double-stranded oligonucleotide of the invention. In some embodiments, the Eg5 gene is suppressed by at least about 85%, 90%, or 95% by administration of the double-stranded oligonucleotide of the invention. Tables 1-3 provides values for inhibition of expression using various Eg5 dsRNA molecules at various concentrations.

[0047] As used herein in the context of Eg5 expression, the terms “treat”, “treatment”, and the like, refer to relief from or alleviation of pathological processes mediated by Eg5 expression. In the context of the present invention insofar as it relates to any of the other conditions recited herein below (other than pathological processes mediated by Eg5 expression), the terms “treat”, “treatment”, and the like mean to relieve or alleviate at least one symptom associated with such condition, or to slow or reverse the progression of such condition, such as the slowing and progression of hepatic carcinoma.

[0048] As used herein, the phrases “therapeutically effective amount” and “prophylactically effective amount” refer to an amount that provides a therapeutic benefit in the treatment, prevention, or management of pathological processes mediated by Eg5 expression or an overt symptom of pathological processes mediated by Eg5 expression (alone or in combination with VEGF expression). The specific amount that is therapeutically effective can be readily determined by ordinary medical practitioner, and may vary depending on factors known in the art, such as, e.g. the type of pathological processes mediated by Eg5 expression, the patient's history and age, the stage of pathological processes mediated by Eg5 expression, and the administration of other anti-pathological processes mediated by Eg5 expression agents.

[0049] As used herein, a “pharmaceutical composition” comprises a pharmacologically effective amount of a dsRNA and a pharmaceutically acceptable carrier. As used herein, “pharmacologically effective amount,” “therapeutically effective amount” or simply “effective amount” refers to that amount of an RNA effective to produce the intended pharmacological, therapeutic or preventive result. For example, if a given clinical treatment is considered effective when there is at least a 25% reduction in a measurable parameter associated with a disease or disorder, a therapeutically effective amount of a drug for the treatment of that disease or disorder is the amount necessary to effect at least a 25% reduction in that parameter.

[0050] The term “pharmaceutically acceptable carrier” refers to a carrier for administration of a therapeutic agent. Such carriers include, but are not limited to, saline, buffered saline, dextrose, water, glycerol, ethanol, and combinations thereof. The term specifically excludes cell culture medium. For drugs administered orally, pharmaceutically acceptable carriers include, but are not limited to pharmaceutically acceptable excipients such as inert diluents, disintegrating agents, binding agents, lubricating agents, sweetening agents, flavoring agents, coloring agents and preservatives. Suitable inert diluents include sodium and calcium carbonate, sodium and calcium phosphate, and lactose, while corn starch and alginic acid are suitable disintegrating agents. Binding agents may include starch and gelatin, while the lubricating agent, if present, will generally be magnesium stearate, stearic acid or talc. If desired, the tablets may be coated with a material such as glyceryl monostearate or glyceryl distearate, to delay absorption in the gastrointestinal tract.

[0051] As used herein, a “transformed cell” is a cell into which a vector has been introduced from which a dsRNA molecule may be expressed.

[0052] II. Double-stranded Ribonucleic Acid (dsRNA)

[0053] In one embodiment, the invention provides double-stranded ribonucleic acid (dsRNA) molecules for inhibiting the expression of the Eg5 gene (alone or incombination with a second dsRNA for inhibiting the expression of VEGF) in a cell or mammal, wherein the dsRNA comprises an antisense strand comprising a region of complementarity which is complementary to at least a part of an mRNA formed in the expression of the Eg5 gene, and wherein the region of complementarity is less than 30 nucleotides in length, generally 19-24 nucleotides in length, and wherein said dsRNA, upon contact with a cell expressing said Eg5 gene, inhibits the expression of said Eg5 gene by at least 40%. The dsRNA comprises two RNA strands that are sufficiently complementary to hybridize to form a duplex structure. One strand of the dsRNA (the antisense strand) comprises a region of complementarity that is substantially complementary, and generally fully complementary, to a target sequence, derived from the sequence of an mRNA formed during the expression of the Eg5 gene, the other strand (the sense strand) comprises a region which is complementary to the antisense strand, such that the two strands hybridize and form a duplex structure when combined under suitable conditions. Generally, the duplex structure us between 15 and 30, more generally between 18 and 25, yet more generally between 19 and 24, and most generally between 19 and 21 base pairs in length. Similarly, the region of complementarity to the target sequence is between 15 and 30, more generally between 18 and 25, yet more generally between 19 and 24, and most generally between 19 and 21 nucleotides in length. The dsRNA of the invention may further comprise one or more single-stranded nucleotide overhang(s). The dsRNA can be synthesized by stranded methods known in the art as further discussed below, e.g., by use of an automated DNA synthesizer, such as are commercially available from, for example, Biosearch, Applied Biosystems, Inc. In a preferred embodiment, the Eg5 gene is the human Eg5 gene. In specific embodiments, the antisense strand of the dsRNA comprises the sense sequences of Tables 1-3 and the second sequence is selected from the group consisting of the antisense sequences of Tables 1-3. Alternative antisense agents that target elsewhere in the target sequence provided in Tables 1-3 can readily be determined using the target sequence and the flanking Eg5 sequence. In embodiments using a second dsRNA targeting VEGF, such agents are exemplified in the Examples and in co-pending U.S. Ser. Nos. 11/078,073 and 11/340,080, herein incorporated by reference.

[0054] The dsRNA will comprise at least two nucleotide sequence selected from the groups of sequences provided in Tables 1-3. One of the two sequences is complementary to the other of the two sequences, with one of the sequences being substantially complementary to a sequence of an mRNA generated in the expression of the Eg5 gene. As such, the dsRNA will comprises two oligonucleotides, wherein one oligonucleotide is described as the sense strand in Tables 1-3 and the second oligonucleotide is described as the antisense strand in Tables 1-3.

[0055] The skilled person is well aware that dsRNAs comprising a duplex structure of between 20 and 23, but specifically 21, base pairs have been hailed as particularly effective in inducing RNA interference (Elbashir et al., EMBO 2001, 20:6877-6888). However, others have found that shorter or longer dsRNAs can be effective as well. In the embodiments described above, by virtue of the nature of the oligonucleotide sequences provided in Tables 1-3, the dsRNAs of the invention can comprise at least one strand of a length of minimally 21 nt. It can be reasonably expected that shorter dsRNAs comprising one of the sequences of Tables 1-3 minus only a few nucleotides on one or both ends may be similarly effective as compared to the dsRNAs described above. Hence, dsRNAs comprising a partial sequence of at least 15, 16, 17, 18, 19, 20, or more contiguous nucleotides from one of the sequences of Tables 1-3, and differing in their ability to inhibit the expression of the Eg5 gene in a FACS assay as described herein below by not more than 5, 10, 15, 20, 25, or 30% inhibition from a dsRNA comprising the full sequence, are contemplated by the invention. Further dsRNAs that cleave within the target sequence provided in Tables 1-3 can readily be made using the Eg5 sequence and the target sequence provided.

[0056] In addition, the RNAi agents provided in Tables 1-3 identify a site in the Eg5 mRNA that is susceptible to RNAi based cleavage. As such the present invention further includes RNAi agents that target within the sequence targeted by one of the agents of the present invention. As used herein a second RNAi agent is said to target within the sequence of a first RNAi agent if the second RNAi agent cleaves the message anywhere within the mRNA that is complementary to the antisense strand of the first RNAi agent. Such a second agent will generally consist of at least 15 contiguous nucleotides from one of the sequences provided in Tables 1-3 coupled to additional nucleotide sequences taken from the region contiguous to the selected sequence in the Eg5 gene. For example, the last 15 nucleotides of SEQ ID NO:1 combined with the next 6 nucleotides from the target Eg5 gene produces a single strand agent of 21 nucleotides that is based on one of the sequences provided in Tables 1-3.

[0057] The dsRNA of the invention can contain one or more mismatches to the target sequence. In a preferred embodiment, the dsRNA of the invention contains no more than 3 mismatches. If the antisense strand of the dsRNA contains mismatches to a target sequence, it is preferable that the area of mismatch not be located in the center of the region of complementarity. If the antisense strand of the dsRNA contains mismatches to the target sequence, it is preferable that the mismatch be restricted to 5 nucleotides from either end, for example 5, 4, 3, 2, or 1 nucleotide from either the 5′ or 3′ end of the region of complementarity. For example, for a 23 nucleotide dsRNA strand which is complementary to a region of the Eg5 gene, the dsRNA generally does not contain any mismatch within the central 13 nucleotides. The methods described within the invention can be used to determine whether a dsRNA containing a mismatch to a target sequence is effective in inhibiting the expression of the Eg5 gene. Consideration of the efficacy of dsRNAs with mismatches in inhibiting expression of the Eg5 gene is important, especially if the particular region of complementarity in the Eg5 gene is known to have polymorphic sequence variation within the population.

[0058] In one embodiment, at least one end of the dsRNA has a single-stranded nucleotide overhang of 1 to 4, generally 1 or 2 nucleotides. dsRNAs having at least one nucleotide overhang have unexpectedly superior inhibitory properties than their blunt-ended counterparts. Moreover, the present inventors have discovered that the presence of only one nucleotide overhang strengthens the interference activity of the dsRNA, without affecting its overall stability. dsRNA having only one overhang has proven particularly stable and effective in vivo, as well as in a variety of cells, cell culture mediums, blood, and serum. Generally, the single-stranded overhang is located at the 3′-terminal end of the antisense strand or, alternatively, at the 3′-terminal end of the sense strand. The dsRNA may also have a blunt end, generally located at the 5′-end of the antisense strand. Such dsRNAs have improved stability and inhibitory activity, thus allowing administration at low dosages, e.g., less than 5 mg/kg body weight of the recipient per day. Generally, the antisense strand of the dsRNA has a nucleotide overhang at the 3′-end, and the 5′-end is blunt. In another embodiment, one or more of the nucleotides in the overhang is replaced with a nucleoside thiophosphate.

[0059] In yet another embodiment, the dsRNA is chemically modified to enhance stability. The nucleic acids of the invention may be synthesized and/or modified by methods well established in the art, such as those described in “Current protocols in nucleic acid chemistry”, Beaucage, S. L. et al. (Edrs.), John Wiley & Sons, Ind., New York, N.Y., USA, which is hereby incorporated herein by reference. Specific examples of preferred dsRNA compounds useful in this invention include dsRNAs containing modified backbones or no natural internucleoside linkages. As defined in this specification, dsRNAs having modified backbones include those that retain a phosphorus atom in the backbone and those that do not have a phosphorus atom in the backbone. For the purposes of this specification, and as sometimes referenced in the art, modified dsRNAs that do not have a phosphorus atom in their internucleoside backbone can also be considered to be oligonucleosides.

[0060] Preferred modified dsRNA backbones include, for example, phosphorothioates, chiral phosphorothioates, phosphorodithioates, phosphotriesters, aminoalkylphosphotriesters, methyl and other alkyl phosphonates including 3′-alkylene phosphonates and chiral phosphonates, phosphinates, phosphoramidates including 3′-amino phosphoramidate and aminoalkylphosphoramidates, thionophosphoramidates, thionoalkylphosphonates, thionoalkylphosphotriesters, and boranophosphates having normal 3′-5′ linkages, 2′-5′ linked analogs of these, and those) having inverted polarity wherein the adjacent pairs of nucleoside units are linked 3′-5′ to 5′-3′ or 2′-5′ to 5′-2′. Various salts, mixed salts and free acid forms are also included.

[0061] Representative U.S. patents that teach the preparation of the above phosphorus-containing linkages include, but are not limited to, U.S. Pat. Nos. 3,687,808; 4,469,863;4,476,301; 5,023,243; 5,177,195; 5,188,897; 5,264,423; 5,276,019; 5,278,302; 5,286,717; 5,321,131; 5,399,676; 5,405,939; 5,453,496; 5,455,233; 5,466,677; 5,476,925; 5,519,126; 5,536,821; 5,541,316; 5,550,111; 5,563,253; 5,571,799; 5,587,361; and 5,625,050, each of which in herein incorporated by reference.

[0062] Preferred modified dsRNA backbones that do not include a phosphorus atom therein have backbones that are formed by short chain alkyl or cycloakyl internucleoside linkages, mixed heteroatoms and alkyl or cycloalkyl internucleoside linkages, or ore or more short chain heteroatomic or heterocyclic internucleoside linkages. These include those having morpholino linkages (formed in part from the sugar portion of a nucleoside); siloxane backbones; sulfide, sulfoxide and sulfone backbones; formacetyl and thioformacetyl backbones; methylene formacetyl and thioformacetyl backbones; alkene containing backbones; sulfamate backbones; methyleneimino and methylenehydrazino backbones; sulfonate and sulfonamide backbones; amide backbones; and others having mixed N, O, S and CH2 component parts.

[0063] Representative U.S. patents that teach the preparation of the above oligonucleosides include, but are not limited to, U.S. Pat. Nos. 5,034,506; 5,166,315; 5,185,444; 5,214,134; 5,216,141; 5,235,033; 5,64,562; 5,264,564; 5,405,938; 5,434,257; 5,466,677; 5,470,967; 5,489,677; 5,541,307; 5,561,225; 5,596,086; 5,602,240; 5,608,046; 5,610,289; 5,618,704; 5,623,070; 5,663,312; 5,633,360; 5,677,437; and, 5,677,439, each of which is herein incorporated by reference.

[0064] In other preferred dsRNA mimetics, both the sugar and the internucleoside linkage, i.e., the backbone, of the nucleotide units are replaced with novel groups. The base units are maintained for hybridization with an appropriate nucleic acid target compound. One such oligomeric compound, and dsRNA mimetic that has been shown to have excellent hybridization properties, is referred to as a peptide nucleic acid (PNA). In PNA compounds, the sugar backbone of an dsRNA is replaced with an amide containing backbone, in particular an aminoethylglycine backbone. The nucleobases are retained and are bound directly or indirectly to aza nitrogen atoms of the amide portion of the backbone. Representative U.S. patents that teach the preparation of PNA compounds include, but are not limited to, U.S. Pat. Nos. 5,539,082; 5,714,331; and 5,719,262; each of which is herein incorporated by reference. Further teaching of PNA compounds can be found in Nielsen et al., Science, 1991, 254, 1497-1500.

[0065] Most preferred embodiments of the invention are dsRNAs with phosphorothioate backbones and oligonucleosides with heteroatom backbones, and in particular —CH.sub.2—NH—CH.cub.2-, —CH.sub.2—N(CH.sub.3)—O—CH.sub.2-[known as a methylene (methylimino) or MMI backbone], —CH.sub.2—O—N(CH.cub.3)—CH.sub.2-, —CH.sub.2—N(CH.sub.3)—N(CH.sub.3)—CH.sub.2- and —N(CH.sub.3)—CH.sub.2—CH.sub.2-[wherein the native phosphodiester backbone is represented as —O—P—O—CH.sub.2-] of the above-referenced U.S. Pat. No. 5,489,677, and the amide backbones of the above-referenced U.S. Pat. No. 5,602,240. Also preferred are dsRNAs having morepholino backbone structures of the above-referenced U.S. Pat. No. 5,034,506.

[0066] Modified dsRNAs may also contain one or more substituted sugar moieties. Preferred dsRNAs comprise one of the following at the 2′ position: OH; F; O-, S-, or N-alkyl; O-, S-, or N-alkenyl; O-, S- or N-alkynyl; or O-alkyl-O-alkyl, wherein the alkyl, alkenyl and alkynyl may be substituted or unsubstituted C.sub.1 to C.sub.10 alkyl or C.sub.2 to C.sub.10 alkenyl and alkynyl. Particularly preferred are O[(CH.sub.2).sub.nO].sub.mCH.sub.3, O(CH.sub.2).ub.nOCH.sub.3, O(CH.sub.2).sub.nNH.sub.2, O(CH.sub.2).xub.nCH.sub.3, O(CH.sub.2).sub.nONH.sub.2, and O(CH.sub.2).sub.nON[(CH.sub.2).sub.nCH.su-b.3)].sub.2, where n and m are from 1 to about 10. Other preferred dsRNAs comprise one of the following at the 2′ position: C.sub.1 to C.sub.10 lower alkyl, substituted lower alkyl, alkaryl, aralkyl, O-alkaryl or O-aralkyl, SH, SCH.sub.3, OCN, Cl, Br, CN, CF.sub.3, SOCH.sub.3, SO.sub.2CH.sub.3, ONO.sub.2, NO.sub.2, N.sub.3, NH.sub.2, heterocycloalkyl, heterocycloalkaryl, aminoalkylamino, polyalkylamino, substituted silyl, an RNA cleaving group, a reporter group, an intercalator, a group for improving the pharmacokinetic properties of an dsRNA, or a group for improving the pharmacodynamic properties of an dsRNA, and other substituents having similar properties. A preferred modification includes 2′-methoxyethoxy (2′-O—CH.sub.2CH.sub.2OCH.sub.3, also known as 2′-O-(2)methoxyethyl) or 2′-MOE) (Martin et al., Helv. Chim. Acta, 1995, 78, 486-504) i.e., an alkozy-alkoxy group. A further preferred modification includes 2′-dimethylaminooxyethoxy, i.e., a O(CH.sub.2).sub.2ON(CH.sub.3).sub.2 group, also known as 2′-DNAOE, as described in examples hereinbelow, and 2′-dimethylaminothoxyethoxy (also known in the art as 2′-O-dimethylaminoethoxyethyl or 2′-DMAEOE), i.e., 2′-O—CH.sub.2-O—CH.sub.2-N(CH.sub.2).sub.2, also described in examples hereinbelow.

[0067] Other preferred modifications include 2′-methoxy (2′-OCH.sub.3), 2′-aminopropoxy (2′-OCH.sub.2CH.sub2NH.sub.2) and 2′-fluoro (2′-F). Similar modifications may also be made at other positions on the dsRNA, particularly the 3′ position of the sugar on the 3′ terminal nulceotide or in 2′-5′ linked dsRNAs and the 5′ position of 5′ terminal nucleotide. DsRNAs may also have sugar mimetics such as cyclobutul moieties in place of the pentofuranosyl sugar. Representative U.S. patents that teach the preparation of such modified sugar structures include, but are not limited to, U.S. Pat. Nos. 4,981,957; 5,118,800; 5,319,080; 5,359,044; 5,393,878; 5,446,137; 5,466,786; 5,514,785; 5,519,134; 5,567,811; 5,576,427; 5,591,722; 5,597,909; 5,610,300; 5,627,053; 5,639,873; 5,646,265; 5,658,873; 5,670,633; and 5,700,920, certain of which are commonly owned with the instant application, and each of which is herein incorporated by reference in its entirety.

[0068] DsRNAs may also include nucleobase (often referred to in the art simply as “base”) modifications or substitutions. As used herein, “unmodified” or “natural” nucleobases include the puring bases adenine (A) and guanine (G), and the pyrimidine bases thymine (T), cytosine (C) and uracil (U). Modified nucleobases include other synthetic and natural nucleobases such as 5-methylcytosine (5-me-C), 5-hydroxymethyl cytosine, xanthine, hypoxanthine, 2-aminoadenine, 6-methyl and other alkyl derivatives of adenine and guanine, 2-propyl and other alkyl derivatives of adenine and guanine, 2-thiouracil, 2-thiothymine and 2-thiocytosine, 5-halouacil and cytosine, 5-propynyl uracil and cytosine, 6-azo uracil, cytosine and thymine, 5-uracil (pseudouracil), 4-thiouracil, 8-halo, 8-amino, 8-thiol, 8-thioalkyl, 8-hydroxyl anal other 8-substituted adenines and guanines, 5-halo, particularly 5-bromo, 5-trifluoromethyl and other 5-substituted uracils and sytosines, 7-methylguanine and 7-methyladenine, 8-azaguanine and 8-azaadenine, 7-deazaguanine and 7-daazaadenine and 3-deazaguanine and 3-deazaadenin. Further nucleobases include those disclosed in U.S. Pat. No. 3,687,808, those disclosed in The Concise Encyclopedia Of Polymer Science And Engineering, pages 858-859, Kroschwitz, J. L, ed. John Wiley & Sons. 1990, these disclosed by Englisch et al., Angewandti Chemie, International Edition, 1991, 30, 613, and those disclosed by Sanghvi, Y S., Chapter 15, DsRNA Research and Applications, pages 289-302, Crooke, S. T. and Lebleu, B., Ed., CRC Press, 1993. Certain of these nucleobases are particularly useful for increasing the binding affinity of the oligomeric compounds of the invention. These include 5-substituted pyrimidines, 6-azapyrimidines and N-2, N-6 and 0-6 substituted purines, including 2-aminopropyladenine, 5-propynyluracil and 5-propynyleytosine, 5-methylcytosine substitutions have been shown to increase nucleic acid duplex stability by 0.6-1.2.degree. C. (Sanghvi, Y. S., Crooke, S. T. and Lebleu, B., Eds., DsRNA Research and Applications, CRC Press, Boca Raton, 1993, pp. 276-278) and are presently preferred base substitutions, even more particularly when combined with 2′-O-methoxyethyl sugar modifications.

[0069] Representative U.S. patents that teach the preparation of certain of the above noted modified nucleobases as well as other modified nucleobases include, but are not limited to, the above noted U.S. Pat No. 3,687,808, as well as U.S. Pat. Nos. 4,845,205; 5,130,30; 5,134,066; 5,175,273; 5,367,066; 5,432,272; 5,457,187; 5,459,255; 5,484,908; 5,502,177; 5,525,711; 5,552,540; 5,587,469; 5,594,121, 5,596,091; 5,614,617; and 5,681,941, each of which is herein incorporated by reference, and U.S. Pat. No. 5,750,692, also herein incorporated by reference.

[0070] Another modification of the dsRNAs of the invention involves chemically linking to the dsRNA one or more moieties or conjugates which enhance the activity, cellular distribution or cellular uptake of the dsRNA. Such moieties include but are not limited to lipid moieties such as a cholesterol moiety (Letsinger et al., Proc. Natl. Acid. Sci. USA, 199, 86, 6553-6556), cholic acid (Mancharan et al., Biorg. Med. Chem. Let., 1994 4 1053-1060), a thioether, e.g., beryl-S-triylthiol (Manoharan et al., Ann, N.Y. Acad. Sci., 1992, 660, 306-309; Manoharan et al., Biorg. Med. Chem. Let., 1993, 3, 2765-2770), a thiocholesterol (Oberhauser et al., Nucl. Acids Res., 1992, 20, 533-538), an aliphatic chain, e.g., dodecandiol or undecyl residues (Saison-Behmoaras et al., EMBO J, 1991, 10, 1111-1118; Kabanov et al., FEBS Lett., 1990, 259, 327-330; Svinarchuk et al., Biochimic, 1993, 75, 49-54), a phospholipid, e.g., di-hexadecyl-rac-hlycerol or triethyl-ammonium 1,2-di-O-hexadecyl-rac-glycero-3-Hphosphonate (Manoharan et al., Tetrahedron Lett., 1995, 36, 3651-3654; Shen et al., Nucl. Acids Res., 1990, 18, 3777-3783), a polyamine or a polyethylene glycol chain (Manoharan et al., Nucleosides & Nucleotides, 1995, 14, 969-973), or adamantane acetic acid (Manoharan et al., Tetrahedron Lett., 1995, 36, 3651-3654), a palmityl moiety (Mishra et al., Biochim. Biophys. Acta, 1995, 1264, 229-237), or an octadecylamine or hexylamino-carbonyloxycholesterol moiety (Crooke et al., J. Pharmacol. Exp. Ther., 1996, 277, 923-937).

[0071] Representative U.S. patents that teach the preparation of such dsRNA conjugates include, but are not limited to, U.S. Pat. Nos. 4,828,979; 4,948,882; 5,218,105; 5,525,465; 5,541,313; 5,545,730; 5,552,538, 5,578,717, 5,580,731; 5,591,584; 5,109,124; 5,118,802; 5,138,045; 5,414,077; 5,486,603; 5,512,439; 5,578,718; 5,608,046; 4,587,044; 4,605,735; 5,667,025; 4,762,779; 4,789,737; 4,824,941; 4,835,263; 4,876,335; 4,904,582; 4,958,013; 5,082,830; 5,112,963; 5,214,136; 5,082,830; 5,112,963; 5,214,136; 5,345,022; 5,254,469; 5,258,506; 5,262,536; 5,272,250; 5,292,873; 5,317,098; 5,371,241; 5,391,723; 5,416,203; 5,451,463; 5,510,475; 5,512,667; 5,514,785; 5,565,552; 5,567,810; 5,574,142; 5,585,481; 5,587,371; 5,595,726; 5,597,696; 5,599,923; 5,599,928 and 5,688,941, each of which is herein incorporated by reference.

[0072] It is not necessary for all positions in a given compound to be uniformly modified, and in fact more than one of the aforementioned modifications may be incorporated in a single compound or even at a single nucleoside within an dsRNA. The present invention also includes dsRNA compounds which are chimeric compounds. “Chimeric” dsRNA compounds or “chimeras,” in the context of this invention, are dsRNA compounds, particularly dsRNAs, which contain two or more chemically distinct regions, each made up of at least one monomer unit, i.e., a nucleotide in the case of an dsRNA compound. These dsRNAs typically contain at least one region wherein the dsRNA is modified so as to confer upon the dsRNA increased resistance to nuclease degradation, increased cellular uptake, and/or increased binding affinity for the target nucleic acid. An additional region of the dsRNA may serve as a substrate for anzymes capable of cleaving RNA-DNA or RNA:RNA hybrids. By way of example, RNase H is a cellular endonuclease which cleaves the RNA strand of an RNA:DNAduplex. Activation of RNase H, therefore, results in cleavage of the RNA target, thereby greatly enhancing the efficiency of dsRNA inhibition of gene expression. Consequently, comparable results can often be obtained with shorter dsRNAs when chimeric dsRNAs are used, compared to phosphorothioate deoxydsRNAs hybridizing to the same target region. Cleavage of the RNA target can be routinely detected by gel electrophoresis and, if necessary, associated nucleic acid hybridization techniques known in the art.

[0073] In certain instances, the dsRNA may be modified by a non-ligand group. A number of non-ligand molecules have been conjugated to dsRNAs in order to enhance the activity, cellular distribution or cellular uptake of the dsRNA, and procedures for performing such conjugations are available in the scientific literature. Such non-ligand moieties have included lipid moieties, such as cholesterol (Letsinger et al., Proc. Natl. Acad. Sci. USA, 1989, 86:6553), cholic acid (Manoharan et al., Bioorg. Med. Chem. Lett., 1994, 4:1053), a thioether, e.g., hexyl-S-tritylthiol (Manoharan et al., Ann. N.Y. Acad, Sci., 1992, 660-306; Manoharan et al., Bioorg. Med. Chem. Let. 1993, 3:2765), a thiocholesterol (Oberhauser et al., Nucl. Acids Res., 1992, 20:533), an aliphatic chain, e.g., dodecandiol or undecyl residues (Saison-Behmoaras et al., EMBO J., 1991, 10:111; Kabanov et al., FEBS Lett., 1990, 259:327; Svinarchuk et al., Biochimie, 1993, 75:49), a phospholipid, e.g., di-hexadecyl-rac-glycerol or triethylammonium 1,2-di-O-hexadecyl-rac-hlycero-3-H-phosphonate (Manoharan et al., Tetrahedron Lett., 1995, 36:3651; Shen et al., Nucl. Acids Res., 1990, 18:3777), a polyamine or a polyethylene glycol chain (Manoharan et al., Nucleosides & Nucleotides, 1995, 14:969), or adamantane acetic acid (Manoharan et al., Tetrahedron Lett., 1995, 36:3651), a palmityl moiety (Mishra et al., Biochim, Biophys. Acta, 1995, 1264:229), or an octadecylamine or hexylamino-carbonyl-oxycholesterol moiety (Crooke et al., J. Pharmacel. Exp. Ther., 1996, 277:923). Representative United States patents that teach the preparation of such dsRNA conjugates have been listed above. Typical conjugation protocols involve the synthesis of dsRNAs bearing an aminolinker at one or more positions of the sequence. The amino group is then reacted with the molecule being conjugated using appropriate coupling or activating reagents. The conjugation reaction may be performed either with the dsRNA still bound to the solid support or following cleavage of the dsRNA in solution phase. Purification of the dsRNA conjugate by HPLC typically affords the pure conjugate.

[0074] Vector Encoded RNAi Agents

[0075] The dsRNA of the invention can also be expressed from recombinant viral vectors intracellularly in vivo. The recombinant viral vectors of the invention comprise sequences encoding the dsRNA of the invention and any suitable promoter for expressing the dsRNA sequences. Suitable promoters include, for example, the U6 or H1 RNA pol III promoter sequences and the cytomegalovirus promoter. Selection of other suitable promoters is within the skill in the art. The recombinant viral vectors of the invention can also comprise inducible or regulatable promoters for expression of the dsRNA in a particular tissue or in a particular intracellular environment. The use of recombinant viral vectors to deliver dsRNA of the invention to cells in vivo is discussed in more detail below.

[0076] dsRNA of the invention can be expressed from a recombinent viral vector either as two separate, complementary RNA molecules, or as a single RNA molecule with two complementary regions.

[0077] Any viral vector capable of accepting the coding sequences for the dsRNA molecule(s) so be expressed can be used, for example vectors derived from adenovirus (AV); adeno-associated virus (AAV); retroviruses (e.g, lentiviruses (LV), Rhabdoviruses, murine leukemia virus); harpes virus, and the like. The tropism of viral vectors can be modified by pseudotyping the vectors with envelope proteins or other surface antigens from other viruses, or by substituting different viral capsid proteins, as appropriate.

[0078] For example, lentiviral vectors of the invention can be pseudotyped with surface proteins from vesicular stomatitis virus (VSV), rabies, Ebola, Mokela, and the like. AAV vectors of the invention can be made to target different cells by engineering the vectors to express different capsid protein serotypes. For example, an AAV vector expressing a serotype 2 capsid on a serotype 2 genome is called AAV 2/2. This serotype 2 capsid gene in the AAV 2/2 vector can be replaced by a serotype 5 capsid gene to produce an AAV 2/5 vector. Techniques for constructing AAV vectors which express different capsid protein serotypes are within the skill in the art; see, e.g., Rabinowitz J E et al. (2002), J Virol 76:791-801, the entire disclosure of which is herein incorporated by reference.

[0079] Selection of recombinant viral vectors suitable for use in the invention, methods for inserting nucleic acid sequences for expressing the dsRNA into the vector, and methods of delivering the viral vector to the cells of interest are within the skill in the art. See, for example, Dornburg R (1995), Gene Therap. 2: 301-310, Eglitis M A (1988), Biotechniques 6: 608-614; Miller A D (1990), Hum Gene Therap. 1: 5-14; Anderson W F (1998), Nature 392: 25-30; and Rubinson D A et al., Nat. Genet. 33: 401-406, the entire disclosures of which are herein incorporated by reference.

[0080] Preferred viral vectors are those derived from AV and AAV. In a particularly preferred embodiment, the dsRNA of the invention is expressed as two separate, complementary single-stranded RNA molecules from a recombinant AAV vector comprising, for example, either the U6 or H1 RNA promoters, or the cytomegalovirus (CMV) promoter.

[0081] A suitable AV vector for expressing the dsRNA of the invention, a method for constructing the recombinant AV vector, and a method for delivering the vector into target cells, are described in Xia H et al. (2002), Nat. Biotech. 20: 1006-1010.

[0082] Suitable AAV vectors for expressing the dsRNA of the invention, methods for constructing the recombinant AV vector, and methods for delivering the vectors into target cells are described in Samulski R et al. (1987), J. Virol. 61: 3096-3101; Fisher K. J et al. (1996), J. Virol, 70: 520-532; Samulski R et al. (1989), J. Virol. 63: 3822-3826; U.S. Pat. No. 5,252,479; U.S. Pat. No. 5,139,941; International Patent Application No. WO 94/13788; and International Patent Application No. WO 93/24641, the entire disclosures of which are herein incorporated by reference.

[0083] III. Pharmaceutical Compositions Comprising dsRNA

[0084] In one embodiment, the invention provides pharmaceutical compositions comprising a dsRNA, as described herein, and a pharmaceutically acceptable carrier. The pharmaceutical composition comprising the dsRNA is useful for treating a disease or disorder associated with the expression or activity of the Eg5 gene, such as pathological processes mediated by Eg5 expression. Such pharmaceutical composition are formulated based on the mode of delivery. One example is compositions that are formulated for systemic administration via parenteral delivery.

[0085] In another embodiment, such compositions will further comprise a second dsRNA that inhibits VEGF expression. dsRNA directed to VEGF are described in the Examples and in co-pending U.S. Ser. Nos. 11/078,073 and 11/340,080.

[0086] The pharmaceutical compositions of the invention are administered to dosages sufficient to inhibit expression of the Eg5 gene (and VEGF expression when a second dsRNA is included). In general, a suitable dose of dsRNA will be in the range of 0.01 to 5.0 milligrams per kilogram body weight of the recipient per day, generally in the range of 1 microgram to 1 mg per kilogram body weight per day. The pharmaceutical composition may be administered once daily or the dsRNA may be administered as two, three, or more sub-doses at appropriate intervals throughout the day or even using continuous infusion or delivery through a controlled release formulation. In that case, the dsRNA contained in each sub-dose must be correspondingly smaller in order to achieve the total daily dosage. The dosage unit can also be compounded for delivery over several days, e.g., using a conventional sustained release formulation which provides sustained release of the dsRNA over a several day period. Sustained release formulations are well known in the art and are particularly useful for delivery of agents at a particular site, such as could be used with the agents of the present invention. In this embodiment, the dosage unit contains a corresponding multiple of the daily dose.

[0087] The skilled artisan will appreciate that certain factors may influence the dosage and timing required to effectively treat a subject, including but not limited to the severity of the disease or disorder, previous treatments, the general health and/or age of the subject, and other diseases present. Moreover, treatment of a subject with a therapeutically effective amount of a composition can include a single treatment or a series of treatments. Estimates of effective dosages and in vivo half-lives for the individual dsRNAs encompassed by the invention can be made using conventional methodologies or on the basis of in vivo testing using an appropriate animal model, as described elsewhere herein.

[0088] Advances in mouse genetics have generated a number of mouse models for the study of various human diseases, such as pathological processes mediated by Eg5 expression. Such models are used for in vivo testing of dsRNA, as well as for determining a therapeutically effective dose.

[0089] The present invention also includes pharmaceutical compositions and formulations which include the dsRNA compounds of the invention. The pharmaceutical compositions of the present invention may be administered in a number of ways depending upon whether local or systemic treatment is desired and upon the area to be treated. Administration may be topical, pulmonary, e.g., by inhalation or insufflation of powders or aerosols, including by nebulizer; intratracheal, intranasal, epidermal and transdermal), oral or parenteral. Parenteral administration includes intravenous, intraarterial, subcutaneous, intraperitoneal or intramuscular injection or infusion; or intracranial, e.g., intrathecal or intraventricular, administration.

[0090] Pharmaceutical compositions and formulations for topical administration may include transdermal patches, ointments, lotions, creams, gels, drops, suppositories, sprays, liquids and powders. Conventional pharmaceutical carriers, aqueous, powder or oily bases, thickeners and the like may be necessary or desirable. Coated condoms, gloves and the like may also be useful. Preferred topical formulations include those in which the dsRNAs of the invention are in admixture with a topical delivery agent such as lipids, liposomes, fatty acids, fatty acid esters, steroids, chelating agents and sufactants. Preferred lipids and liposomes include neutral (e.g. dioleoylphosphatidyl DOPE ethanolamine, dimyristoylphosphatidyl choline DMPC, distearolyphosphatidyl choline) negative (e.g. dimyristoylphosphatidyl glycerol DMPG) and cationic (e.g. dioleoyltetramethylaminopropyl DOTAP and dioleoylphosphatidyl ethanolamine DOTMA). DsRNAs of the invention may be encapsulated within liposomes or may form complexes thereto, in particular to cationic liposomes. Alternatively, dsRNAs may be complexed to lipids, in particular to cationic lipids. Preferred fatty acids and esters include but are not limited arachidonic acid, oleic acid, eicosanoic acid, lauric acid, caprylic acid, capric acid, myristic acid, palmitic acid, stearic acid, linoleic acid, linolenic acid, dieaprate, tricaprate, monoolein, dilaurin, glyceryl 1-monocaprate, 1-dodecylazacycloheptan-2-one, an acylcamitine, an acylcholine, or a C₁₋₁₀ alkyl ester (e.g. isopropylmyristate IPM), monoglyceride, diglyceride or pharmaceutically acceptable salt thereof. Topical formulations are described in detail in U.S. patent application Ser. No. 09/315,298 filed on May 20, 1999 which is incorporated herein by reference in its entirety.

[0091] Compositions and formulations for oral administration include powders or granules, microparticulates, nanoparticulates, suspensions or solutions or solutions in water or non-aqueous media, capsules, gel capsules, sachets, tablets or minitablets. Thickeners, flavoring agents, diluents, emulsifiers, dispersing aids or binders may be desirable. Preferred oral formulations are those in which dsRNAs of the invention are administered in conjunction with one or more penetration enhancers surfactants and chelators. Preferred surfactants include fatty acids and/or esters or salts thereof, bile acids and/or salts thereof. Preferred bile acids/salts include chenodeoxycholic acid (CDCA) and ursodeoxychenodeoxycholic acid (UDCA), cholic acid, dehydrocholic acid, deoxycholic acid, glucholic acid, glycholic acid, glycodeoxycholic acid, taurocholic acid, taurodeoxycholic acid, sodium tauro-24,25-digydro-fusidate and sodium glycodihydrofusidate. Preferred fatty acids include arachidonic acid, undecanoic acid, oleic acid, lauric acid, caprylic acid, capric acid, myristic acid palmitic acid, stearic acid, linoleic acid, linolenic acid, dicaprate, tricaprate, monoolein, dilaurin, glycerly 1-monocaprate, 1-dodecylazacycloheptan-2-one, an acylcarnitine, an acylcholine, or a monoglyceride, a diglyceride or a pharmaceutically acceptable salt thereof (e.g. sodium). Also preferred are combinations of penetration enhancers, for example, fatty acids/salts in combination with bile acids/salts. A particularly preferred combination is the sodium salt of lauric acid, capric acid and UDCA. Further penetration enhancers include polyoxyethylene-9-lauryl ether, polyoxyethylene-20-cetyl ether. DsRNAs of the invention may be delivered orally, in granular form including sprayed dried particles, or complexed to form micro or nanoparticles. DsRNA complexing agents include poly-amino acids; polyimines; polyacrylates; polyalkylacrylates, polyoxethanes, polyalkyleyanoacrylates; cationized gelatins, albumins, starches, acrylates, polyethyleneglycols (PEG) and starches; polyalkylcyanoacrylates; DEAE-derivatized polimines, pollulans, celluloses and starches. Particularly preferred complexing agents include chitosan, N-trimethylchitosan, poly-L-lysine, polyhistidine, polyomithine, polyspermines, protamine, polyvinylpyridine, polythiodiethylaminomethylethylene P(TDAE), polyaminostyrene (e.g. p-amino), poly(methyleyanoacrylate), poly(ethylcyanoacrylate), poly(butylcayanoacrylate), poly(isobutylcyanoacrylate), poly(isohexyleynaoacrylate), DEAE-methacrylate, DEAE-hexylacrylate, DEAE-acrylamide, DEAE-albumin and DEAE-dextran, polymethylacrylate, polyhexylacrylate, poly(D,L-lactic acid), poly(DL-lactic-co-glycolic acid (PLGA), alginate, and polyethyleneglycol (PEG). Oral formulations for dsRNAs and their preparation are described in detail in U.S. application Ser. No. 08/886,829 (filed Jul. 1, 1997), Ser. No. 09/108,673 (filed Jul. 1, 1998), Ser No. 09/256,515 (filed Feb. 23, 1999), Ser. No. 09/082,624 (filed May 21, 1998) and Ser. No. 09/315,298 (filed May 20, 1999), each of which is incorporated herein by reference in their entirety.

[0092] Compositions and formulations for parenteral, intrathecal, intraventricular or intrahepatic administration may include sterile aqueous solutions which may also contain buffers, diluents and other suitable additives such as, but not limited to, penetration enhancers, carrier compounds and other pharmaceutically acceptable carriers or excipients.

[0093] Pharmaceutical compositions of the present invention include, but are not limited to, solutions, emulsions, and liposome-containing formulations. These compositions may be generated from a variety of components that include, but are not limited to, preformed liquids, self-emulsifying solids and self-emulsifying semisolids. Particularly preferred are formulations that target the liver when treating hepatic disorders such as hepatic carcinoma.

[0094] The pharmaceutical formulations of the present invention, which may conventeitly be presented in unit dosage form, may be prepared according to conventional techniques well known in the pharmaceutical industry. Such techniques include the step of bringing into association the active ingredients with the pharmaceutical carrier(s) or excipient(s). In general, the formulations are prepared by uniformly and intimately bringing into association the active ingredients with liquid carriers or finely divided solid carriers or both, and the, if necessary, shaping the product.

[0095] The compositions of the present invention may be formulated into any of many possible dosage forms such as, but not limited to, tablets, capsules, gel capsules, liquid syrups, soft gels, suppositories, and enemas. The compositions of the present invention may also be formulated as suspensions in aqueous, non-aqueous or mixed media. Aqueous suspensions may further contain substances which increase the viscosity of the suspension including, for example, sodium carboxymethylcellulose, sorbitol and/or dextran. The suspension may also contain stabilizers.

[0096] Emulsions

[0097] The compositions of the present invention may be prepared and formulated as emulsions. Emulsions are typically heterogenous systems of one liquid dispersed in another in the form of droplets usually exceeding 0.1 .mu.m in diameter (Idson, in Pharmaceutical Dosage Forms, Lieberman, Rieger and Bander (Eds.), 1988, Marcel Dekker, Inc., New York, N.Y., volumn 1, p. 199; Rosoff, in Pharmaceutical Dosage Forms, Leiberman, Rieger and Banker (Eds.), 1988, Marcel Dekker, INc., New York, N.Y., Volume 1, p. 245; Block in Pharmaceutical Dosage Forms, Leiberman, Rieger and Banker (Eds.), 1988, Marcel Dekker, Inc., New York, N.Y., Volume 2, p. 335; Higuchi et al., in Remington's Pharmaceutical Sciences, Mack Publishing Co., Easton, Pa., 1985, p. 301). Emulsions are often biphasic systems comprising two immiscible liquid phases intimately mixed and dispersed with each other. In general emulsions may be of either the water-in-oil (w/o) or the oil-in-water (o/w) variety. When an aqueous phase is finely divided into and dispersed as minute droplets into a bulk oily phase, the resulting composition is called a water-in-oil (w/o) emulsion. Alternatively, when an oily phase is finely divided into and dispersed as minute droplets into a bulk aqueous phase, the resulting composition is called an oil-in-water (o/w) emulsion. Emulsions may contain additional components in addition to the dispersed phases, and the active drug which may be present as a solution in either the aqueous phase, oily phase or itself as a separate phase. Pharmaceutical excipients such as emulsifiers, stabilizers, dyes, and anti-oxidants may also be present in emulsions as needed. Pharmaceutical emulsions may also be multiple emulsions that are comprised of more than two phases such as, for example, in the case of oil-in-water-in-oil (o/w/o) and water-in-oil-in-water (w/o/w) emulsions. Such complex formulations often provide certain advantages that simple binary emulsions do not. Multiple emulsions in which individual oil droplets of an o/w emulsion enclose small water droplets constitute a w/o/w emulsion. Likewise a system of oil droplets enclosed in globules of water stabilized in an oily continuous phase provides an o/w/o emulsion.

[0098] Emulsions are characterized by little or no thermodynamic stability. Often, the dispersed or discontinuous phase of the emulsion is well dispersed into the external or continuous phase and maintained in this form through the means of emulsifiers or the viscosity of the formulation. Either of the phases of the emulsion may be a semisolid or a solid, as is the case of emulsion-style ointment bases and creams. Other means of stabilizing emulsions entail the use of emulsifiers that may be incorporated into either phase of the emulsion. Emulsifiers may broadly be classified into four categories: synthetic surfactants, naturally occurring emulsifiers, absorption bases, and finely dispersed solids (Idson, in Pharmaceutical Dosage Forms, Lieberman, Rieger and Banker (Eds.), 1988, Marchel Dekker, Inc., New York, N.Y., volume 1, p. 199).

[0099] Synthetic surfactants, also known as surface active agents, have found wide applicability in the formulation of emulsions and have been reviewed in the literature (Rieger, in Pharmaceutical Dosage Forms, Lieberman, Rieger and Banker (Eds.), 1988, Marcel Dekker, Inc., New York, N.Y., volume 1, p. 285; Idson, in Pharmaceutical Dosage Forms, Lieberman, Rieger and Banker (Eds.), Marcel Dekker, Inc., New York, N.Y., 1988, volumn 1, p. 199). Surfactants are typically amphiphilic and comprise a hydrophilic and a hydrophobic portion. The ratio of the hydrophilic to the hydrophobic nature of the surfactant has been termed the hydrophile/lipophile balance (HLB) and is a valuable tool in categorizing and selecting surfactants in the preparation of formulations. Surfactants may be classified into different classes based on the nature of the hydrophilic group: nonionic, anionic, cationic and amphoteric (Rieger, in Pharmaceutical Dosage Forms, Lieberman, Rieger and Banker (Eds.), 1988, Marcel Dekker, Inc., New York, N.Y., volume 1, p. 285).

[0100] Naturally occurring emulsifiers used in emulsion formulations include lanolin, beeswax, phosphatides, lecithin and acacia. Absorption bases possess hydrophilic properties such that they can soak up water to form w/o emulsions yet retain their sermisolid consistencies, such as anhydrous lanolin and hydrophilic petrolatum. Finely divided solids have also been used as good emulsifiers especially in combination with surfactants and in viscous preparations. These include polar inorganic solids, such as heavy metal hydroxides, nonswelling clays such as bentonite, attapulgite, hectorite, kaolin montmorillonite, colloidal aluminum silicate and colloidal magnesium aluminum silicate, pigments and nonpolar solids such as carbon or glyceryl tristearate.

[0101] A large variety of non-emulsifying materials are also included in eulsion formulations and contribute to the properties of emulsions. These include fats, oils, waxes, fatty acids, fatty alcohols, fatty esters, humectants, hydrophilic colloids, preservatives and antioxidants (Block, in Pharmaceutical Dosage Forms, Lieberman, Rieger and Banker (Eds.), 1988, Marcel Dekker, Inc., New York, N.Y., volume 1, p. 335; Idson, in Pharmaceutical Dosage Forms, Lieberman, Rieger and Bander (Eds.), 1988, Marcel Dekker, Inc., New York, N.Y., volume 1, p. 199).

[0102] Hydrophilic colloids or hydrocolloids include naturally occurring gums and synthetic polymers such as polysaccharides (for example, acacia, agar, alginic acid, carrageenan, guar gum, karaya gum, and tragacanth), cellulose derivatives (for example, carboxymethylcellulose and carboxypropylcellulose), and synthetic polymers (for example, carbomers, cellulose ethers, and carboxyvinyl polymers). These disperse or swell in water to form colloidal solutions that stabilize emulsions by forming strong interfacial films around the dispersed-phase droplets and by increasing the viscosity of the ixternal phase.

[0103] Since emulsions often contain a number of ingredients such as carbohydrates, proteins, sterols and phosphatides that may readily support the growth of microbes, these formulations often incorporate preservatives. Commonly used preservatives included in emulsion formulations include methyl paraben, propyl paraben, quatemary ammonium salts, benzalkonium chloride, esters of p-hydroxybenzoic acid, and boric acid. Antioxidants are also commonly added to emulsion formulations to prevent detreioration of the formulation. Antioxidants used may be free radical scavengers such as tocopherols, alkyl gallates, butylated hydroxyanisole, butylated hydroxytoluene, or reducing agents such as ascorbic acid and sodium metabisulite, and antioxidant synergists such as citric acid, tartaric acid, and lecithin.

[0104] The application of emulsion formulations via dermatological, oral and parenteral routes and methods for their manufacture have been reviewed in the literature (Idson, in Pharmaceutical Dosage Forms, Lieberman, Rieger and Banker (Eds.), 1988, Marcel Dekker, Inc., New York, N.Y., volume 1, p. 199). Emulsion formulations for oral delivery have been very widely used because of ease of formulation, as well as efficacy from an absorption and bioavailability standpoint (Rosoff, in Pharmaceutical Dosage Forms, Lieberman, Rieger and Banker (Eds.), 1988, Marcel Dekker, Inc., New York, N.Y., volume 1, p. 245; Idson, in Pharmaceutical Dosage Forms, Lieberman, Rieger and Banker (Eds.), 1988, Marcel Dekker, Inc., New York, N.Y., volume 1, p. 199). Mineral-oil base laxatives, oil-soluble vitamins and high fat nutritive preparations are among the materials that have commonly been administered orally as o/w emulsions.

[0105] In one embodiment of the present invention, the compositions of dsRNAs and nucleic acids are formulated as microemulsions. A microemulsion may be defined as a system of water, oil and amphiphile which is a single optically isotropic and thermodynamically stable liquid solution (Rosoff, in Pharmaceutical Dosage Forms, Lieberman, Rieger and Banker (Eds.), 1988, Marcel Dekker, Inc., New York, N.Y., volume 1, p. 245). Typically microemulsions are systems that are prepared by first dispersing an oil in an aqueous surfactant solution and then adding a sufficient amount of a fourth component, generally an intermediate chain-length alcohol to form a transparent system. Therefore, microemulsions have also been described as thermodynamically stable, isotropically clear dispersions of two immiscible liquids that are stabilized by interfacial films of surface-active moleculses (Leung and Shah, in: Controlled Release of Drugs: Polymers and Aggregate Systems, Rosoff, M., Ed., 1989, VCH Publishers, New York, pages 185-215). Microemulsions commonly are prepared via a combination of three to five components that include oil, water, surfactant, cosurfactant and electrolyte. Whether the microemulsion is of the water-in-oil (w/o) or an oil-in-water (o/w) type is dependent on the properties of the oil and surfactant used and on the structure and geometric packing of the polar heads and hydrocarbon tails of the surfactant molecules (Schott, in Remington's Pharmaceutical Sciences, Mack Publishing Co., Easton, Pa., 1985, p. 271).

[0106] The phenomenological approach utilizing phase diagrams has been extensively studied and has yielded a comprehensive knowledge, to one skilled in the art, of how to formulate microemulsions (Rosoff, in Pharmaceutical Dosage Forms, Lieberman, Rieger and Banker (Eds.), 1988, Marcel Dekker, Inc., New York, N.Y., volume 1, p. 245; Block, in Pharmaceutical Dosage Forms, Lieberman, Rieger and Banker (Eds.), 1988, Marcel Dekker, Inc., New York, N.Y., volume 1, p. 335). Compared to conventional emulsions, microemulsions offer the advantage of solubilizing water-insoluble drugs in a formulation of thermodynamically stable droplets that are formed spontaneously.

[0107] Surfactants used in the preparation of microemulsions include, but are not limited to, ionic surfactants, non-ionic surfactants, Brij 96, polyoxyehtylene oleyl ethers, plyglycerol fatty acid esters, tetraglycerol monolaurate (ML310), tetraglycerol monooleate (MO310), hexaglycerol monooleate (PO310), hexaglycerol pentaoleate (PO500), decaglycerol monocaprate (MCA750), decaglycerol monooleate (MO750), decaglycerol sequioleate (SO750), decaglycerol decaoleate (DAO750), alone or in combination with cosurfactants. The sosurfactant, usually a short-chain alcohol such as ethanol, 1-propanol, and 1-butanol, serves to increase the interfacial fluidity by penetrating into the surfactant film and consequently creating a disordered film because of the void space generated among surfactant molecules. Microemulsions may, however, be prepared without the use of cosurfactants and alcohol-free self-emulsifying microemulsion systems are known in the art. The aqueous phase may typically be, but is not limited to, water, an aqueous solution of the drug, glycerol, PEG300, PEG400, polyglycerols, propylene glycols, and derivatives of ethylene glycol. The oil phase may include, but is not limited to, materials such as Captex 300, Captex 355, Capmul MCM, fatty acid esters, medium chain (C8-C12) mono, di, and tri-glycerides, polyoxyethylated glyceryl fatty esters, fatty alcohols, polyglycolized glycerides, saturated polyglycolized C8-C10 glycerides, vegetable oils and silicone oil.

[0108] Microemulsions are particularly of interest from the standpoint of drug solubilization and the enhanced absorption of drugs. Lipis based microemulsions (both o/w and w/o) have been proposed to enhance the oral bioavailibility of drugs, including peptides (Constrantinides et al., Pharmaceutical Research, 1994, 11, 1385-1390; Ritschel, Meth. Find. Exp. Clin. Pharmacol., 1993, 13, 205). Microemulsions afford advantages of improved drug solubilization, protection of drug from enzymatic hydrolysis, possible enhancement of drug absorption due to surfactant-induced alterations in membrane fluidity and permeability, ease of preparation, ease of oral administration over solic dosage forms, improved clinical potency, and decreased toxicity (Constantinides et al.,Pharmaceutical Research, 1994, 11, 1385; Ho et al., J. Pharm. Sci., 1996, 85, 138-143). Often microemulsions may form spontaneously when their components are brought together at ambient temperature. This may be particularly advantageous when formulating thermolabile drugs, piptides or dsRNAs. Microemulsions have also been effective in the transdermal delivery of active components in both cosmetic and pharmaceutical applications. It is expected that the microemulsion compositions and formulations of the present invention will facilitate the increased systemic absorption of dsRNAs and nucleic acids from the gastrointestinal tract, as well as improve the local cellular uptake of dsRNAs and nucleic acids.

[0109] Microemulsions of the present invention may also contain additional components and additives such as sorbitan monostearate (Grill 3), Labrasol, and penetration enhancers to improve the properties of the formulation and to enhance the absorption of the dsRNAs and nucleic acids of the present invention. Penetration enhancers used in the microemulsions of the present invention may be classified as belonging to one of five broad categories—surfactants, fatty acids, bile salts, chelating agents, and non-chelating non-surfactants (Lee et al., Critical Reviews in Therapeutic Drug Carrier Systems, 1991, p. 92). Each of these classes has been discussed above.

[0110] Liposomes

[0111] There are many organized surfactant structures besides microemulsions that have been studied and used for the formulation of drugs. These include monolayers, micelles, bilayers and vesicles. Vesicles, such as liposomes, have attracted great interest because of their specificity and the duration of action they offer from the standpoint of drug delivery. As used in the present invention, the term “liposome” means a vesicle composed of amphiphilic lipids arranged in a spherical bilayer or bilayers.

[0112] Liposomes are unilamellar or multilamellar vesicles which have a membrane formed from a lipophilic material and an aqueous interior. The aqueous portion contains the composition to be delivered. Cationic liposomes possess the advantage of being able to fuse to the cell wall. Non-cationic liposomes, although not able to fuse as efficiently with the cell wall, are taken up by macrophages in vivo.

[0113] In order to cross intact mammalian skin, lipid vesicles must pass through a series of fine pores, each with a diameter less than 50 nm, under the influence of a suitable transdermal gradient. Therefore, it is desirable to use a liposome which is highly deformable and able to pass through such fine pores.

[0114] Further advantages of liposomes include; liposomes obtained from natural phospholipids are biocompatible and biodegradable; liposomes can incorporate a wide range of water and lipid soluble drugs; liposomes can protect encapsulated drugs in their internal compartments from metabolism and degradation (Rosoff, in Pharmaceutical Dosage Forms, Lieberman, Rieger and Banker (Eds.), 1988, Marcel Dekker, Inc., New York, N.Y., volume 1, p. 245). Important considerations in the preparation of liposome formulations are the lipid surface charge, vesicle size and the aqueous volume of the liposomes.

[0115] Liposomes are useful for the transfer and delivery of active ingredients to the site of action. Because the liposomal membrane is structurally similar to biological membranes, when liposomes are applied to a tissue, the liposomes start to merge with the cellular membranes and as the merging of the liposome and cell progresses, the liposomal contents are emptied into the cell where the active agent may act.

[0116] Lipsomal formulations have been the focus of extensive investigation as the mode of delivery for many drugs. There is growing evidence that for topical administration, liposomes present several advantages over other formulations. Such advantages include reduced side-effects related to high systemic absorption of the administered drug, increased accumulation of the administered drug at the desired target, and the ability to administer a wide variety of drugs, both hydrophilic and hydrophobic, into the skin.

[0117] Several reports have detailed the ability of liposomes to deliver agents including high-molecular weight DNA into the skin. Compounds including analgesics, antibodies, hormones and high-molecular weight DNAs have been administered to the skin. The majority of applications resulted in the targeting of the upper epidermis.

[0118] Liposomes fall into two broad classes. Cationic liposomes are positively charged liposomes which interact with the negatively charged DNA molecules to form a stable complex. The positively charged DNA/liposome complex binds to the negatively charged cell surface and is internalized in an endosome. Due to the acidic pH within the endosome, the liposomes are ruptured, releasing their contents into the cell cytoplasm (Wang et al., Biochem. Biophys. Res. Commun., 1987, 147, 980-985).

[0119] Liposomes which are pH-sensitive or negatively-charged , entrap DNA rather than complex with it. Since both the DNA and the lipid are similarly charged, repulsion rather than complex formation occurs. Nevertheless, some DNA is entrapped within the aqueous interior of these liposomes. pH-sensitive liposomes have been used to deliver DNA encoding the thymidine kinase gene to cell monolayers in culture. Expression of the exogenous gene was detected in the target cells (Zhou et al., Journal of Controlled Release, 1992, 19, 269-274).

[0120] One major type of liposomal composition includes phospholipids other than naturally-derived phosphatidylcholine. Neutral liposome compositions, for example, can be formed from dimyristoyl phosphatidylcholine (DMPC) or dipalmitoyl phosphatidylcholine (DPPC). Anionic liposome compositions generally are formed from dimyristoyl phosphatidylglycerol, while anionic fusogenic liposomes are formed primarily from dioleoyl phosphatidylethanolamine (DOPE). Another type of liposomal composition is formed from phosphatidylcholine (PC) such as, for example, soybean PC, and egg PC. Another type of formed from mixtures of phospholipid and/or phosphatidylcholine and/or cholesterol.

[0121] Several studies have assessed the topical delivery of liposomal drug formulations to the skin. Application of liposomes containing interferon to guinea pig skin resulted in a reduction of skin herpes sores while delivery of interferon via other means (e.g. as a solution or as an emulsion) were ineffective (Weiner et al., Journal of Drug Targeting, 1992, 2, 405-410). Further, an additional study tested the efficacy of interferon administered as part of a liposomal formulation to the administration of interferon using an aqueous system, and concluded that the liposomal formulation was superior to aqueous administration (du Plessis et al., Antiviral Research, 1992, 18, 259-265).

[0122] Non-ionic liposomal systems have also been examined to determine their utility in the delivery of drugs to the skin, in particular systems comprising non-ionic surfactant and cholesterol. Non-ionic liposomal formulations comprising Novasome.TM.I (glyceryl dilaurate/cholesterol/po-lyoxyethylene-10-stearyl ether) and Novasome.TM.II (glyceryl distearate/cholesterol/polyoxyethylene-10-stearyl ether) were used to deliver cyclosporin-A into the dermis of mouse skin. Results indicated that such non-ionic liposomal systems were effective in facilitating the deposition of cyclosporin-A into different layers of the skin (Hu et al. S.T.P.Pharma. Sci., 1994, 4, 6, 466).

[0123] Liposomes also include “sterically stabilized” liposomes, a term which, as used herein, refers to liposomes comprising one or more specialized lipids that, when incorporated into liposomes, result in enhanced circulation lifetimes relative to liposomes lacking such specialized lipids. Examples of sterically stabilized liposomes are those in which part of the vesicle-forming lipid portion of the liposome (A) comprises one or more glycolipids, such as monosialoganglioside G.sub.M1, or (B) is derivatized with one or more hydrophilic polymers, such as a polyethylene glycol (PEG) moiety. While not wishing to be bound by any particular theory, it is thought in the art that, at least for sterically stabilized liposomes containing gangliosides, sphingomyelin, or PEG-derivatized lipids, the enhanced circulation half-life of these sterically stabilized liposomes derives from a reduced uptake into cells of the reticuloendothelial system (RES) (Allen et al., FEBS Letters, 1987, 223, 42; Wu et al., Cancer Research, 1993, 53, 3765).

[0124] Various liposomes comprising one or more glycolipids are known in the art. Papagadjopoulos et al. (Ann. N.Y. Acad. Sci., 1987, 507, 64) reported the ability of monosialoganglioside G.sub.M1, galactocerebrodside sulfate and phosphatidylinositol to improve blood half-lives of liposomes. These findings were expounded upon by Gabizon et al. (Proc. Natl. Acad. Sci. U.S.A., 1988, 85, 6949), U.S. Pat. No. 4,837,028 and WO 88/04924, both to Allen et al., disclose liposomes comprising (1) sphingomyelin and (2) the ganglioside G.sub.M1 or a galactocerebroside sulfate ester. U.S. Pat. No. 5,543,152 (Webb et al.) discloses liposomes comprising sphingomyelin. Liposomes comprising 1,2-sn-dimyristoylphosphat-idylcholine are disclosed in WO 97/13499 (Lim et al).

[0125] Many liposomes comprising lipids derivatized with one or more hydrophilic polymers, and methods of preparation thereof, are known in the art. Sunamoto et al. (Bull. Chem. Soc. Jpn., 1980, 53, 2778) described liposomes comprising a nonionic detergent, 2C.sub.1215G, that contains a PEG moiety. Illum et al. (FEBS Lett., 1984, 167, 79) noted that hydrophilic couting of polystyrene particles with polymeric glycols results in significantly enhanced blood half-lives. Synthetic phospholipids modified by the attachment of carboxylic groups of polyalkylene glycols (e.g., PEG) are described by Sears (U.S. Pat. Nos. 4,426,330 and 4,534,899). Klibanov et al. (FEBS Lett., 1990, 268, 235) described experiments demonstrating that liposomes comprising phosphatidylethanolamine (PE) derivatized with PEG or PEG stearate have significant increases in blood circulation half-lives. Blume et al. (Biochimica et Biophsica Acta, 1990, 1029, 91) extended such observations to other PEG-derivatized phospholipids, e.g., DSPE-PEG, formed from the combination of distearoylphosphatidylethanolamine (DSPE) and PEG.Liposomes having covalently bound PEG moieties on their external surface are described in European Patent No. EP 0 445 131 B1 and WO 90/04384 to Fisher. Liposome compositions containing 1-20 mole percent of PE derivatized with PEG, and methods of use thereof, are described by Woodle et al. (U.S. Pat. Nos. 5,013,556 and 5,356,633) and Martin et al. (U.S. Pat. No. 5,213,804 and European Patent No. EP 0 496 813 B1). Liposomes comprising a number of other lipid-polymer conjugates are disclosed in WO 91/05545 and U.S. Pat. No. 5,225,212 (both to Martin et al.) and in WO 94/20073 (Zalipsky et al.) Liposomes comprising PEG-modified ceramide lipids are described in WO 96/10391 (Choi et al). U.S. Pat. No. 5,540,935 (Miyazaki et al.) and U.S. Pat. No. 5,556,948 (Tagawa et al.) describe PEG-containing liposomes that can be further derivatized with functional moieties on their surfaces.

[0126] A limited number of liposomes comprising nucleic acids are known in the art. WO 96/40062 to Thierry et al. discloses methods for encapsulating high molecular weight nucleic acids in liposomes. U.S. Pat. No. 5,264,221 to Tagawa et al. discloses protein-bonded liposomes and asserts that the contents of such liposomes may include an dsRNA RNA. U.S. Pat. No. 5,665,710 to Rahman et al. describes certain methods of encapsulating oligodeoxynucleotides in liposomes. WO 97/04787 to Love et al. discloses liposomes comprising dsRNA dsRNAs targeted to the raf gene.

[0127] Transfersomes are yet another type of liposomes, and are highly deformable lipid aggregates which are attractive candidates for drug delivery vehicles. Transfersomes may be described as lipid droplets which are so highly deformable that they are easily able to penetrate through pores which are smaller than the droplet. Transfersomes are adaptable to the environment in which they are used, e.g. they are self-optimizing (adaptive to the shape of pores in the skin), self-repairing, frequently reach their targets without fragmenting, and often self-loading. To make transfersomes it is possible to add surface edge-activators, usually surfactants, to a standard liposomal composition. Transfersomes have been used to deliver serum albumin to the skin. The transfersome-mediated delivery of serum albumin has been shown to be as effective as subcutaneous injection of a solution containing serum albumin.

[0128] Surfactants find wide application in formulations such as emulsions (including microemulsions) and liposomes. The most common way of classifying and ranking the properties of the many different types of surfactants, both natural and synthetic, is by the use of the hydrophile/lipophile balance (HLB). The nature of the hydrophilic group (also known as the “head”) provides the most useful means for categorizing the different surfactants used in formulations (Rieger, in Pharmaceutical Dosage Forms, Marcel Dekker, Inc., New York, N.Y. 1988, p. 285).

[0129] If the surfactant molecule is not ionized, it is classified as a nonionic surfactant. Nonionic surfactants find wide application in pharmaceutical and cosmetic products and are usable over a wide range of pH values. In general their HLB values range from 2 to about 18 depending on their structure. Nonionic surfactants include nonionic esters such as ethylene glycol esters, propylene glycol esters, glyceryl esters, polyglyceryl esters, sorbitan esters, sucrose esters, and ethoxylated esters. Nonionic alkanolamides and ethers such as fatty alcohol ethoxylates, propoxylated alcohols, and ethoxylated/propoxylated block polymers are also included in this class. The polyoxyethylene surfactants are the most popular members of the nonionic surfactant class.

[0130] If the surfactant molecule carries a negative charge when it is disolved or dispersed in water, the surfactant is classified as anionic. Anionic surfactants include carboxylates such as soaps, acyl lactylates, acyl amides of amino acids, esters of sulfuric acid such as alkyl sufates and ethoxylated alkyl sulfates, sulfonates such as alkyl benzene sulfonates, acyl isethionates, acyl taurates and sulfosuccinates, and phosphates. The most important members of the anionic surfactant class are the alkyl sulfates and the soaps.

[0131] If the surfactant molecule carries a positve charge when it is dissolved or dispersed in water, the surfactant is classified as cationic. Cationic surfactants include quaternary ammonium salts and ethoxylated amines. The quaternary ammonium salts are the most used members of this class.

[0132] If the surfactant molecule has the ability to carry either a positive or negative charge, the surfactant is classified as amphoteric. Amphoteric surfactants include acrylic acid derivatives, substituted alkylamides, N-alkylbetaines and phosphatides.

[0133] The use of surfactants in drug products, formulations and in emulsions has been reviewed (Rieger, in Pharmaceutical Dosage Forms, Marcel Dekker, Inc., New York, N.Y., 1988, p. 285).

[0134] Penetration Enhancers

[0135] In one embodiment, the present invention employs various penetration enhancers to effect the efficient delivery of nucleic acids, particularly dsRNAs, to the skin of animals. Most drugs are present in solution in both ionized and nonionized forms. However, usually only lipid soluble or lipophilic drugs readily cross cell membranes. It has been discovered that even non-lipophilic drugs may cross cell membranes if the membrane to be crossed is treated with a penetration enhancer. In addition to aiding the diffusion of non-lipophilic drugs across cell membranes, penetration enhancers also enhance the permeability of lipophilic drugs.

[0136] Penetration enhancers may be classified as belonging to one of five broad categories, i.e., surfactants, fatty acids, bile salts, chelating agents, and non-chelating non-surfactants (Lee et al., Critical Reviews in Therapeutic Drug Carrier Systems, 1991, p. 92). Each of the above mentioned classes of penetration enhancers are described below in greater detail.

[0137] Surfactants: In connection with the present invention, surfactants (or “surface-active agents”) are chemical entities which, when dissolved in an aqueous solution, reduce the surface tension of the solution or the interfacial tension between the aqueous solution and another liquid, with the result that absorption of dsRNAs through the mucosa is enhanced. In addition to bile salts and fatty acids, these penetration enhancers include, for example, sodium lauryl sulfate, polyoxyethylene-9-lauryl ether and polyoxyethylene-20-cetyl ether) (Lee et al., Critical Reviews in Therapeutic Drug Carrier Systems, 1991, p. 92); and perfluouochemical emulsions, such as FC-43. Takahashi et al., J. Pharm. Pharmacol., 1988, 40, 252).

[0138] Fatty acids: Various fatty acids and their derivatives which act as penetration enhancers include, for example, oleic acid, lauric acid, capric acid (N-decanoic acid), myristic acid, palmitic acid, stearic acid, linoleic acid, linolenic acid, dicaprate, tricaprate, monoolein (1-monooleoyl-rac-glycerol), dilaurin, caprylic acid, arachidonic acid, glycerol 1-monocaprate, 1-dodecylazacycloheptan-2-one, acylearnitines, acylcholines, C.sub.1-10 alkyl esters thereof (e.g., methyl, isopropyl and t-butyl), and mono- and di-glycerides thereof (i.e., oleate, laurate, caprate, myristate, palmitate, stearate, linoleate, etc.) (Lee et al., Critical Reviews in Therapeutic Drug Carryier Systems, 1991, p. 92; Muranishi, Critical Reviews in Terapeutic Drug Carrier Systems, 1990, 7, 1-33; El Hariri et al., J. Pharm. Pharmacol., 1992, 44, 651-654).

[0139] Bile salts: The physiological role of bile includes the facilitation of dispersion and absorption of lipids and fat-soluble vitamins (Brunton, Chapter 38 in: Goodman & Gilman's The Pharmacological Basis of Therapeutics, 9the Ed., Hardman et al. Eds., McGraw-Hill, New York, 1996, pp. 934-935). Various natural bile salts, and their synthetic derivatives, act as penetration enhancers. Thus the term “bile salts” includes any of the naturally occurring components of bile as well as any of their synthetic derivatives. The bile salts of the invention include, for example, cholic acid (or its pharmaceutically acceptable sodium salt, sodium cholate), dehydrocholic acid (sodium dehydrocholate), deoxycholic acid (sodium deoxycholate), glucholic acid (sodium glucholate), glycholic acid (sodium glycocholate), glycodeoxyeholic acid (sodium glycodeoxycholate), taurocholic acid (sodium taurocholate), taurodeoxycholic acid (sodium taurodeoxycholate), chanodeoxycholic acid (sodium chenodeoxycholate), ursodeoxycholic acid (UDCA), sodium tauro-24,25-dihydro-fusidate (STDHF), sodium glycodihydrofusidate and polyoxyethylene-9-lauryl ether (POE) (Lee et al., Critical Reviews in therapeutic Drug Carrier Systems, 1991, page 92; Swinyard, Chapter 39 In: Remington's Pharmaceutical Sciences, 18th Ed., Gennaro, ed., Mack Publishing Co., Easton, Pa., 1990, pages 782-783; Muranishi, Critical Reviews in Therapeutic Drug Carrier Systems, 1990, 79, 579-583).

[0140] Chelating Agents: Chelating agents, as used in connection with the present invention, can be defined as compounds that remove metallic ions from solution by forming complexes therewith, with the result that absorption of dsRNAs through the mucosa is enhanced. With regards to their use as penetration enhancers in the present invention, chelating agents have the added advantage of also serving as DNase inhibitors, as most characterized DNA nucleases require a divalent metal ion for catalysis and are thus inhibited by chelating agents (Jarrett, J. Chromatogr., 1993, 618, 315-339). Chelating agents of the invention include but are not limited to disodium ethylenediaminetetraacetate (EDTA), citric acid, salicylates (e.g., sodium salicylate, 5-methoxysalicylate and homovanilate), N-acyl derivatives of collagen, laureth-9 and N-amino acyl derivatives of beta-diketones (enamines)(Lee et al., Critical Reviews in Therapeutic Drug Carrier Systems, 1991, page 92; Muranishi, Critical Reviews in Therapeutic Drug Carrier Systems, 1990, 7, 1-33; Buur et al., J. Control Rel., 1990, 14, 43-51).

[0141] Non-chelating non-surfactants: As used herein, non-chelating non-surfactant penetration enhancing compounds can be defined as compounds that demonstrate insignificant activity as chelating agents or as surfactants but that nonetheless enhance absorption of dsRNAs through the alimentary mucose (Muranishi, Critical Reviews in Therapeutic Drug Carrier Systems, 1990, 7, 1-33). This class of penetration enhancers include, for example unsaturated cyclic ureas, 1-alkyl- and 1-alkenylazacycle-alkanone derivatives (Lee et al., Critical Reviews in Therapeutic Drug Carrier Systems, 1991, page 92); and non-steroidal anti-inflammatory agents such as diclofenac sodium, indomethacin and phenylbutazone (Yamashita et al., J. Pharm. Pharmacol., 1987, 39, 621-626).

[0142] Agents that enhance uptake of dsRNAs at the cellular level may also be added to the pharmaceutical and other compositions of the present invention. For example cationic lipids, such as lipodectin (Junichi et al, U.S. Pat. No. 5,705,188), cationic hlycerol derivatives, and polycationic molecules, such as polylysine (Lollo et al., PCT Application WO 97/30731), are also known to enhance the cellular uptake of dsRNAs.

[0143] Other agents may be utilized to enhance the penetration of the administered nucleic acids, including glycols such as ethylene glycol and propylene glycol, pyrrols such as 2-pyrrol, azones, and terpenes such as limonene and menthone.

[0144] Carriers

[0145] Certain compositions of the present invention also incorporate carrier compounds in the formulation. As used herein, “carrier compound” or “carrier” can refer to a nucleic acid, or analog thereof, which is inert (i.e., does not possess biological activity per se) but is recognized as a nucleic acid by in vivo processes that reduce the bioavailability of a nucleic acid having biological activity by, for example, degrading the biologically active nucleic acid or promoting its removal from circulation. The coadministration of a nucleic acid and a carrier compound, typically with an excess of the latter substance, can result in a substantial reduction of the amount of nucleic acid recovered in the liver, kidney or other extracirculatory reservoirs, presumably due to competition between the carrier compound and the nucleic acid for a common receptor. For example, the recovery of a partially phosphorothioate dsRNA in hepatic tissue can be reduced when it is coadministered with polyinosinic acid, dextran sulate, polyytidic acid or 4-acetamido-4′isothiocyano-stilbene-2,2′-disulfonic acid (Miyao et al., DsRNA Res. Dev., 1995, 5, 115-121; Takakura et al., DsRNA & Nucl. Acid Drug Dev., 1996, 6, 177-183.

[0146] Excipients

[0147] In contrast to a carrier compound, a “pharmaceutical carrier” or “excipient” is a pharmaceutically acceptable solvent, suspending agent or any other pharmacologically inert vehicle for delivering one or more nucleic acids to an animal. The excipient may be liquid or solic and is selected, with the planned manner of administration in mind, so as to provide for the desired bulk, consistency, etc., When combined with a nucleic acid and the other components of a given pharmaceutical composition. Typical pharmaceutical carriers include, but are not limited to, binding agents (e.g., pregelatinized maize starch, polyvinylpyrrolidone or hydroxypropyl methylcellulose, etc.); fillers (e.g., lactose and other sugars, microcrystalline cellulose, pectin, gelatin, calcium sulfate, ethyl cellulose, polyacrylates or calcium hydrogen phosphate, etc.); lubricants (e.g., magnesium stearate, tale, silica, colloidal silicon dioxide, stearic acid, metallic stearates, hydrogenated vegetable oils, corn starch, polyethylene glycols, sodium benzoate, sodium acetate, etc.); disintegrants (e.g., starch, sodium starch glycolate, etc.); and wetting agents (e.g., sodium lauryl sulphate, etc).

[0148] Pharmaceutically acceptable organic or inorganic excipient suitable for non-parenteral administration which do not deleteriously react with nucleic acids can also be used to formulate the compositions of the present invention. Suitable pharmaceutically acceptable carriers include, but are not limited to, water, salt solutions, alcohols, polyethylene glycols, gelatin, lactose, amylose, magnesium stearate, talc, silicic acid, viscous paraffin, hydroxymethylcellulose, polyvinylpyrrolidone and the like.

[0149] Formulations for toptical administration of nucleic acids may include sterile and non-sterile aqueous solutions, non-aqueous solutions in common solvents such as alcohols, or solutions of the nucleic acids in liquid or solid oil bases. The solutions may also contain buffers, diluents and other suitable additives. Pharmaceutically acceptable organic or inorganic excipients suitable for non-parenteral administration which do not deleteriously react with nucleic acids can be used.

[0150] Suitable pharmaceutically acceptable excipients include, but are not limited to, water, salt solutions, alcohol, polyethylene glycols, gelatin, lactose, amylose, magnesium stearate, talc, silicic acid, viscous paraffin, hydroxymethylcellulose, polyvinylpyrrolidone and the like.

[0151] Other Components

[0152] The compositions of the present invention may additionally contain other adjunct components conventionally found in pharmaceutical compositions, at their art-established usage levels. Thus, for example, the compositions may contain additional, compatible, pharmaceutically-active materials such as, for example, antipurities, astringents, local anesthetics or anti-inflammatory agents, or may contain additional materials useful in physically formulating various dosage forms of the compositions of the present invention, such as dyes, flavoring agents, preservatives, antioxidants, opacifiers, thickening agents and stabilizers. However, such materials, when added, should not unduly interfere with the biological activities of the components of the compositions of the present invention. The formulations can be sterilized and, if desired, mixed with auxiliary agents, e.g., lubricants, preservatives, stabilizers, wetting agents, emulsifiers, salts for influencing osmotic pressure, buffers, colorings, flavorings and/or aromatic substances and the like which do not deleteriously interact with the nucleic acid(s) of the formulation.

[0153] Aqueous suspensions may contain substances which increase the viscosity of the suspension including, for example, sodium carboxymethylcellulose, sorbitol and/or dextran. The suspension may also contain stabilizers.

[0154] Certain embodiments of the invention provide pharmaceutical compositions containing (a) one or more antisense compounds and (b) one or more other chemotherapeutic agents which function by a non-antisense mechanism. Examples of such chemotherapeutic agents include but are not limited to daunorubicin, daunomycin, dactinomycin, doxorubicin, epirubicin, idarubicin, esorubicin, bleomycin, mafosfamide, ifosfamide, cytosine arabinoside, bis-chloroethylnitrosurea, busulfan, mitomycin C, actinomycin D, mithramycin, prednisone, hydroxyprogesterone, testosterone, tamoxifen, decarbazine, procarbazine, hexamethylmelamine, pentamethylmelamine, mitoxantrone, amsacrine, chlorambucil, methylcyclohexylnitrosurea, nitrogen mustards, melphalan, cyclophosphamide, 6-mercaptopurine, 6-thioguanine, cytarabine, 5-azacytidine, hydroxyurea, deoxycoformycin, 4-hydroxyperoxycyclophosphor-amide, 5-fluorouracil (5-FU), 5-fluorodeoxyuridine (5-FUdR), methotrexate (MTX), colchicine, taxol, vincristine, vinblastine, etoposide (VP-16), trimetrexate, irinotecan, topotecan, gemcitabine, teniposide, cisplatin and diethylstilbestrol (DES). See, generally, The Merck Manual of Diagnosis and Therapy, 15th Ed. 1987, pp. 1206-1228, Berkow et al., eds., Rahway, N.J. When used with the compounds of the invention, such chemotherapeutic agents may be used individually (e.g., 5-FU and oligonucleotide), sequentially (e.g., 5-FU and oligonucleotide for a period of time followed by MTX and oligonucleotide), or in combination with one or more other such chemotherapeutic agents (e.g., 5-FU, MTX and oligonucleotide, or 5-FU, radiotherapy and oligonucleotide). Anti-inflammatory drugs, including but not limited to nonsteroidal anti-inflammatory drugs and corticosteroids, and antiviral drugs, including but not limited to ribivirin, vidarabine, acyclovir and ganciclovir, may also be combined in compositions of the invention. See, generally, The Merck Manual of Diagnosis and Therapy, 15th Ed., Berkow et al., eds., 1987, Rahway, N.J., pages 2499-2506 and 46-49, respectively). Other non-antisense chemotherapeutic agents are also within the scope of this invention. Two or more combined compounds may be used together or sequentially.

[0155] Toxicity and therapeutic efficacy of such compounds can be determined by standard pharmaceutical procedures in cell cultures or experimental animals, e.g., for determining the LD50 (the dose lethal to 50% of the population) and the Ed50 (the dose therapeutically effective in 50% of the population). The dose ration between toxic and therapeutic effects is the therapeutic index and it can be expressed as the ratio LD50/ED50. Compounds which exhibit high therapeutic indices are preferred.

[0156] The data obtained from cell culture assays and animal studies can be used in formulation a range of dosage for use in humans. The dosage of compositions of the invention lies generally within a range of circulating concentrations that include the Ed50 with little or no toxicity. The dosage may vary within this range depending upon the dosage form employed and the route of administration utilized. For any compound used in the method of the invention, the therapeutically effective dose can be estimated initially from cell culture assays. A dose may be formulated in animal models to achieve a circulating plasma concentration range of the compound or, when appropriate, of the polypeptide product of a target sequence (e.g., achieving a decreased concentration of the polypeptide) that includes the IC50 (i.e., the concentration of the test compound which achieves a half-maximal inhibition of symptoms) as determined in cell culture. Such information can be used to more accurately determine useful doses in humans. Levels in plasma may be measured, for example, by high performance liquid chromatography.

[0157] In addition to their administration individually or as a plurality, as discussed above, the dsRNAs of the invention can be administered in combination with other known agents effective in treatment of pathological processes mediated by Eg5 expression. In any event, the administering physician can adjust the amount and timing of dsRNA administration on the basis of results observed using standard measures of efficacy known in the art or described herein.

[0158] Methods for Treating Diseases Caused by Expression of the Eg5 Gene

[0159] The invention relates in particular to the use of a dsRNA or a pharmaceutical composition prepared thereform for the treatment of cancer, e.g., for inhibiting tumor growth and tumor metastasis. For example, the dsRNA or a pharmaceutical composition prepared therefrom may be used for the treatment of solid tumors, like breast cancer, lung cancer, head and neck cancer, brain cancer, abdominal cancer, colon cancer, colorectal cancer, esophagus cancer, gastrointestinal cancer, glioma, liver cancer, tongue cancer, neuroblastoma, osteosarcoma, ovarian cancer, pancreatic cancer, prostate cancer, retinoblastoma, Wilm's tumor, multiple myeloma and for the treatment of skin cancer, like melanoma, for the treatment of lymphormas and blood cancer. The invention further relates to the use of an dsRNA according to the invention or a pharmaceutical composition prepared therefrom for inhibiting eg5 expression and/or for inhibiting accumulation of ascites fluid and plural effusion in different types of cancer, e.g., breast cancer, lung cancer, head cancer, neck cancer, brain cancer, abdominal cancer, colon cancer, colorectal cancer, esophagus cancer, gastrointestinal cancer, glioma, liver cancer, tongue cancer, neuroblastoma, osteosarcoma, ovarian cancer, pancreatic cancer, prostate cancer, retinoblastoma, Wilm's tumor, multiple myeloma, skin cancer, melanoma, lymphomas and blood cancer. Owing to the inhibitory effect on eg5 expression, an dsRNA according to the invention or a pharmaceutical composition prepared thereform can enhance the quality of life.

[0160] The invention futhermore relates to the use of an dsRNA or a pharmaceutical composition thereof, e.g., for treating cancer or for preventing tumor metastasis, in combination with other pharmaceuticals and/or other therapeutic methods, e.g., with known pharmaceuticals and/or known therapeutic methods, such as, for example, those which are currently employed for treating cancer and/or for preventing tumor metastasis. Preference is given to a combination with radiation therapy and chemotherapeutic agents, such as cisplatin, cyclophosphamide, 5-fluoroacil, adriamycin, daunorabicin or tamoxifen. Other embodiments include the use of a second dsRNA used to inhibit the expression of VEGF.

[0161] The invention can also be practiced by including with a specific RNAi agent, in combination with another anti-cancer chemotherapeutic agent, such as any conventional chemotherapeutic: agent, or another dsRNA used to inhibit the expression of VEGF. The combination of a specific binding agent with such other agents can potentiate the chemotherapeutic protocol. Numerous chemotherapeutic protocols will present themselves in the mind of the skilled practitioner as being capable of incorporation into the method of the invention. Any chemotherapeutic agent can be used, including alkylating agents, antimetabolites, hormones and antagonists, radioisotopes, as well as natural products. For example, the compound of the invention can be administered with antibiotics such as doxorubicin and other anthracycline analogs, nitrogen mustards such as cyclophosphamide, pyrimidine analogs such as 5-fluorouracil, cisplatin, hydroxyurea, traxol and its natural and synthetic derivatives, and the like. As another example, in the case of mixed tumors, such as adenocarcinoma of the breast, where the tumors include gonadotropin-dependent and gonadotropin-independent cells, the compound can be administered in conjunction with leuprolide or goserelin (synthetic peptide analogs of LH-RH). Other antineoplastic protocols include the use of a tetracycline compound with another treatment modality, e.g.,surgery, radiation, etc., also referred to herein as “adjunct antineoplastic modalities.” Thus, the method of the invention can be employed with such conventional regimens with the benefit of reducing side effects and enhancing efficacy.

[0162] Methods for Inhibiting Expression of the Eg5 Gene

[0163] In yet another aspect, the invention provides a method for inhibiting the expression of the Eg5 gene in a mammal. The method comprises administering a composition of the invention to the mammal such that expression of the target Eg5 gene is silenced. Because of their high specificity, the dsRNAs of the invention specifically target RNAs (primary or processed) of the target Eg5 gene. Compositions and methods for inhibiting the expression of these Eg5 genes using dsRNAs can be performed as described elsewhere herein.

[0164] In one embodiment, the method comprises administering a composition comprising a dsRNA, wherein the dsRNA comprises a nucleotide sequence which is complementary to at least a part of an RNA transcript of the Eg5 gene of the mammal to be treated. When the organism to be treated is a mammal such as a human, the compositions may be administered by any means known in the art including, but not limited to oral or parenteral routes, including intravenous, intramuscular, subcutaneous, transdermal, airway (aerosol), nasal, rectal, and topical (including buccal and sublingual) administration. In preferred embodiments, the compositions are administered by intravenous infusion or injection.

[0165] Unless otherwise defined, all technical and scientific terms used herein have the same meaning as commonly understood by one of ordinary skill in the art to which this invention belongs. Although methods and materials similar or equivalent to those described herein can be used in the practice or testing of the invention, suitable methods and materials are described below. All publications patent applications, patents, and other references mentioned herein are incorporated by reference in their entirety. In case of conflict, the present specification, including definitions, will control. In addition, the materials, methods, and examples are illustrative only and not intended to be limiting.

### EXAMPLES

[0166] Gene Walking of the Eg5 Gene

[0167] Initial Screening Set

[0168] siRNA design was carried out to identify siRNAs targeting Eg5 (also known as KIF11, HSKP, KNSL1 and TRIP5). Human mRNA sequences to Eg5, RefSeq ID number:NM_{—}004523, was used.

[0169] siRNA duplexes cross-reactive to human and mouse Eg5 were designed. Twenty-four duplexes were synthesized for screening. (Table 1).

[0170] Expanded Screening Set

[0171] A second screening set was defined with 266 siRNAs targeting human EG5, as well as its rhesus monkey ortholog (Table 2). An expanded screening set was selected with 328 siRNA targeting human EG5, with no necessity to hit any EG5 mRNA of other species (Table 3).

[0172] The sequences for human and a partial rhesus EG5 mRNAs were downloaded from NCBI Nucleotide database and the human sequence was further on used as reference sequence (Human EG5:NM_{—}004523.2, 4908 bp, and Rhesus EG5: XM_{—}001087644.1, 878 bp (only 5′ part of human EG5).

[0173] For identification of further rhesus EG5 sequences a mega blast search with the human sequence was conducted at NCBI against rhesus reference genome. The downloaded rhesus sequence and the hit regions in the blast hit were assembled to a rhesus consensus sequence with ˜92% identity to human EG5 over the full-length.

[0174] All possible 19 mers were extracted from the human mRNA sequence, resulting in the pool of candidate target sites corresponding to 4890 (sense strand) sequences of human-reactive EG5 siRNAs.

[0175] Human-rhesus cross-reactivity as prerequisite for in silico selection of siRNAs for an initial screening set out of this candidate pool. To determine rhesus-reactive siRNAs, each candidate siRNA target site was searched for presence in the assembled rhesus sequence. Further, the predicted specificity of the siRNA as criterion for selection of out the pool of human-rhesus cross-reactive siRNAs, manifested by targeting human EG5 mRNA sequences, but not other human mRNAs.

[0176] The specificity of an siRNA can be expressed via its potential to target other genes, which are referred to as “off-target genes”.

[0177] For predicting the off-target potential of an siRNA, the following assumptions were made:
[0178] 1) off-target potential of a strand can be deduced from the number and distribution of mismatches to an off-target
[0179] 2) the most relevant off-target, that is the gene predicted to have the highest probability to be silenced due to tolerance of mismatches, determines the off-target potential of the strand
[0180] 3) positions 2 to 9 (counting 5′ to 3′) of a strand (seed region) may contribute more to off-target potential than rest of sequence (that is non-seed and cleavage site region)
[0181] 4) positions 10 and 11 (counting 5′ to 3′) of a strand (cleavage site region) may contribute more to off-target potential than non-seed region (that is positions 12 to 18, counting 5′ to 3′)
[0182] 5) position 1 and 19 of each strand are not relevant for off-target interactions
[0183] 6) off-target potential can be expressed by the off-target score of the most relevant off-target, calculated based on number and position of mismatches of the strand to the most homologous region in the off-target gene considering assumptions 3 to 5
[0184] 7) off-target potential of antisense and sense strand will be relevant, whereas potential abortion of sense strand activity by internal modifications introduced is likely

[0185] SiRNAs with low off-target potential were defined as preferable and assumed to be more specific.

[0186] In order to identify human EG5-specific siRNAs, all other human transcripts, which were all considered potential off-targets, were searched for potential target regions for human-rhesus cross-reactive 19 mer sense strand sequences as well as complementary antisense strands. For this, the fastA algorithm was used to determine the most homologues hit region in each sequence of the human RefSeq database, which we assume to represent the comprehensive human transcriptome.

[0187] To rank all potential off-targets according to assumptions 3 to 5, and by this identify the most relevant off-target gene and its off-target score, fastA output files were analyzed further by a perl script.

[0188] The script extracted the following off-target properties for each 19 mer input sequence and each off-target gene to calculate the off-target score:
[0189] Number of mismatches in non-seed region
[0190] Number of mismatches in seed region
[0191] Number of mismatches in cleavage site region

[0192] The off-target score was calculated by considering assumptions 3 to 5 as follows:

$$Off \text{-} target score = number of seed mismatches * 10 + number of cleavage site mismatches * 1.2 + number of non \text{-} seed mismatches * 1$$

[0193] The most relevant off-target gene for each 19 mer sequence was defined as the gene with the lowest off-target score. Accordingly, the lowest off-target score was defined as representative for the off-target potential of a strand.

[0194] For the screening set in Table 2, an off-target score of 3 or more for the antisense strand and 2 or more for the sense strand was chosen as prerequisite for selection of siRNAs, whereas all sequences containing 4 or more consecutive G's (poly-G sequences) were excluded. 266 human-rhesus cross-reactive sequences passing the specificity criterion, were selected based on this cut-off (see Table 2).

[0195] For definition of the expended screening set the cross-reactivity to rhesus was disgarded, re-calculated the predicted specificity based on the newly available human RefSeq database and selected only those 328 non-poly-G siRNAs with off-target score of 2,2 or more for the antisense and sense strand (see Table 3).

[0196] For the Tables: Key: A,G,C,U-ribonucleotides: T-deoxythymidine: u,c-2′-O-mehtyl nucleotides: s-phosphorothioate linkage

[0197] dsRNA Synthesis

[0198] Source of Reagents

[0199] Where the source of a reagent is not specifically given herein, such reagent may be obtained from any supplier of reagents for molecular biology at a quality/purity standard for application in molecular biology.

[0200] siRNA Synthesis

[0201] Single-stranded RNAs were produced by solid phase synthesis on a scale of 1 μmole using an Expedite 8909 synthesizer (Applied Biosystems, Applera Deutschland GmbH, Darmstadt, Germany) and controlled pore glass (CPG, 500 Å, Proligo Biochemie GmbH, Hamburg, Germany) as solid support. RNA and RNA containing 2′-O-methyl nucleotides were generated by solid phase synthesis employing the corresponding phosphoramidites and 2′-O-methyl phosphoramidites, respectively (Proligo Biochemic GmbH, Hamburg, Germany). These building blocks were incorporated at selected sites within the sequence of the oligoribonucleotide chain using standard nucleoside phosphoramidite chemistry such as descried in Current protocols in nucleic acid chemistry, Beaucage, S. L. et al. (Edrs.), John Wiley & Sons, Ind., New York, N.Y., USA. Phosphorothioate linkages were introduced by replacement of the iodine oxidizer solution with a solution of the Beaucage reagent (Chruachem Ltd, Glasgow, UK) in acetonitrile (1%). Further ancillary reagents were obtained from Mallinckrodt Baker (Griesheim, Germany).

[0202] Deprotection and purification of the crude oligoribonucleotides by anion exchange HPLC were carried out according to established procedures. Yields and concentrations were determined by UV absorption of a solution of the respective RNA at a wavelength of 260 nm using a spectral photometer (DU 640B, Beckman Coulter GmbH, Unterschleiβheim, Germany). Double stranded RNA was generated by mixing an equimolar solution of complementary strands in annealing buffer (20 mM sodium phosphate, pH 6.8; 100 mM sodium chloride), beated in a water bath at 85-90° C. for 3 minutes and cooled to room temperature over a period of 3-4 hours. The annealed RNA solution was stored at −20° C. until use.

[0203] For the synthesis of 3′-cholesterol-conjugated siRNAs (herein referred to as -Chol-3′), an appropriately modified solid support was used for RNA synthesis. The modified solid support was prepared as follows:

[0204] Diethyl-2-azabutane-1,4-dicarboxylate AA

[chemical structure]

[0205] A 4.7 M aqueous solution of sodium hydroxide (50 mL) was added into a stirred, ice-cooled solution of ehtyl glycinate hydrochloride (32.19 g, 0.23 mole) in water (50 mL). Then, ethyl acrylate (23.1 g, 0.23 mole) was added and the mixture was stirred at room temperature until completion of the reaction was ascertained by TLC. After 19 h the solution was partitioned with dichloromethane (3×100 mL). The organic layer was dried with anhydrous sodium sulfate, filtered and evaporated. The residue was distilled to afford AA (28.8 g, 61%).

[0206] 3-{Ethoxycarbonylmethyl-[6-(9H-fluoren-9-ylmethoxycarbonyl-amino)-hexanoyl]-amino}-propionic acid ethyl ester AB

[chemical structure]

[0207] Fmoc-6-amino-hexanoic acid (9.12 g, 25.83 mmol) was dissolved in dichloromethane (50 mL) and cooled with ice. Diisopropylcarbodiimde (3.25 g, 3.99 mL, 25,83 mmol) was added to the solution at 0° C. It was then followed by the addition of Diethyl-azabutane-1,4-dicarboxylate (5 g, 24.6 mmol) and dimethylamino pyridine (0.305 g, 2.5 mmol). The solution was brought to room temperature and stirred further for 6 h. Completion of the reaction was ascertained by TLC. The reaction mixture was concentrated under vacuum and ethyl acetate was added to precipitate diisopropyl area. The suspension was filtered. The filtrate was washed with 5% aqueous hydrochloric acid, 5% sodium bicarbonate and water. The combined organic layer was dried over sodium sulfate and concentrated to give the crude product which was purified by column chromatography (50% EtOAC/Hexanes) to yield 11.87 g (88%) of AB.

[0208] 3-[(6-Amino-hexanoyl)-ethoxycarbonylmethyl-amino]-propionic acid ethyl ester AC

[chemical structure]

[0209] 3-{Ethoxycarbonylmethyl-[6-(9H-fluoren-9-ylmethoxycarbonylamino)-hexanoyl]-amino}-propionic acid ethyl ester AB (11.5 g, 21.3 mmol) was dissolved in 20% piperidine in dimethylformamide at 0° C. The solution was continued stirring for 1 h. The reaction mixture was concentrated under vacuum, water was added to the residue, and the product was extracted with ethyl acetate. The crude product was purified by conversion into its hydrochloride salt.

[0210] 3-({6-[17-1,5-Dimethyl-hexyl)-10,13-dimethyl-2,3,4,7,8,9,10,11,12,13,14,15,16,17-tetradecahydro-1H-cyclopenta[a]phenanthren-3-yloxycarbonylamino]-hexanoyl} ethoxycarbonylmethyl-amino)-propionic acid ethyl ester AD

[chemical structure]

[0211] The hydrdochloride salt of 3-[(6-Amino-hexanoyl)-ethoxycarbonylmethyl-amino]-propionic acid ethyl ester AC(4.7 g, 14.8 mmol) was taken up in dichloromethane. The suspension was cooled to 0° C. on ice. To the suspension diisopropylethylamine (3.87 g, 5.2 mL, 30 mmol) was added. To the resulting solution cholesteryl chloroformate (6.675 g, 14.8 mmol) was added. The reaction mixture was stirred overnight. The reaction mixture was diluted with dichloromethane and washed with 10% hydrochloric acid. The product was purified by flash chromatography (10.3 g, 92%).

[0212] 1-{6-[17-(1,5-Dimethyl-hexyl)-10,13-dimethyl-2,3,4,7,8,9,10,11,12,13,14,15,16,17-tetradecahydro-1H-cyclopents[a] phenanthren-3-yloxycarbonylamino]-hexanoyl}-4-oxo-pyrrolidine-3-carboxylic acid ethyl ester AE

[chemical structure]

[0213] Potassium t-butoxide (1.1 g, 9.8 mmol) was slurried in 30 mL of dry toluene. The mixture was cooed to 0° C. on ice and 5 g (6.6 mmol) of diester AD was added slowly with stirring within 20 mins. The temperature was kept below 5° C. during the addition. The stirring was continued for 30 mins at 0° C. and 1 mL of glacial acetic acid was added, immediately followed by 4 g of NaH₂PO₄-H₂O in 40 mL of water. The resultant mixture was extracted twice with 100 mL of dichloromethane each and the combined organic extracts were washed twice with 10 mL of phosphate buffer each, dried, and evaporated to dryness. The residue was dissolved in 60 mL of toluene, cooled to 0° C. and extracted with three 50 mL portions of cold pH 9.5 carbonate buffer. The aqueous extracts were adjusted to pH 3 with phosphoric acid, and extracted with five 40 mL portions of chloroform which were combined, dried and evaporated to dryness. The residue was purified by column chromatography using 25% ethylacetate/hexane to afford 1.9 g of b-detoester (39%).

[0214] [6-(3-Hydroxy-4-hydroxymethyl-pyrrolidin-1-yl)-6-oxo-hexyl]-carbamic acid 17-(1,5-dimethyl-hexyl)-10,13-dimethyl-2,3,4,7,8,9,10,11,12,13,14,15,16,17-tetradecahydro-1H-cyclopenta[a]phenanthren-3-yl ester AF

[chemical structure]

[0215] Methanol (2.) was added dropwise over a period of 1 h to a refluxing mixture of b-ketoester AE (1.5 g, 2.2 mmol) and sodium borohydride (0.226 g, 6 mmol) in tetrahydrofuran (10 mL). Stirring was continued at reflux temperature for 1 h. After cooling to room temperature, 1 N NCl (12.5 mL) was added, the mixture was extracted with ethylacetate (3×40 mL). The combined ethylacetate layer was dried over anhydrous sodium sulfate and concentrated under vacuum to yield the product which was purified by column chromatography (10% MeOH/CHCl₃) (89%).

[0216] (6-{3-[Bis-(4-methoxy-phenyl)-phenyl-methoxymethyl]-4-hydroxy-pyrrolidin-1-yl}-6-oxo-hexyl)-carbamic acid 17-(1,5-dimethyl-hexyl)-10,13-dimethyl-2,3,4,7,8,9,10,11,12,13,14,15,16,17-tetradecahydro-1H-cyclopenta[a]phenanthren-3-yl ester AG

[chemical structure]

[0217] Diol AF (1.25 g, 1.994 mmol) was dried by evaporating with pyridine (2×5 mL) in vacuo. Anhydrous pyridine (10 mL) and 4,4′-dimethoxytritylchloride (0.724 g, 2.13 mmol) were added with stirring. The reaction was carried out at room temperature overnight. The reaction was quenched by the addition of methanol. The reaction mixture was concentrated under vacuum and to the residue dichloromethane (50 mL) was added. The organic layer was washed with 1M aqueous sodium bicarbonate. The organic layer was dried over anhydrous sodium sulfate, filtered and concentrated. The residual pyridine was removed by evaporating with toluene. The crude product was purified by column chromatography (2% MeOH/Chloroform, Rf=0.5 in 5% MeOH/CHCl₃) (1.75 g, 95%).

[0218] Succinic acid mono-(4-[bos-(4-methoxy-phenyl-methoxymethyl]-1-{6-[17-(1,5-dimethyl-hexyl)-10,13-dimethyl 2,3,4,7,8,9,10,11,12,13,14,15,16,17-tetradecahydro-1H cyclopenta[a]phenanthren-3-yloxycarbonylamino]-hexanoyl}-pyrrolidin-3-yl) ester AH

[chemical structure]

[0219] Compound AG (1.0 g, 1.05 mmol) was mixed with succinic anhydride (0.150 g, 1.5 mmol) and DMAP (0.073 g, 0.6 mmol) and dried in a vacuum at 40° C. overnight. The mixture was dissolved in anhydrous dichloroethane (3 mL), triethylamine (0.318 g, 0.0440 mL, 3.15 mmol) was added and the solution was stirred at room temperature under argon atmosphere for 16 h. It was then diluted with dichloromethane (40 mL) and washed with ice cold aqueous citric acid (5 wt %, 30 mL) and water (2×20 mL). The organic phase was dried over anhydrous sodium sulfate and concentrated to dryness. The residue was used as such for the next step.

[0220] Cholesterol Derivatised CPG AI

[chemical structure]

[0221] Succinate AH (0.254 g, 0.242 mmol) was dissolved in a mixture of dichloromethane/acetonitrile (3:2, 3 mL). To that solution DMAP (0.0296 g, 0.242 mmol) in acetonitrile (1.25 mL), 2,2′-Dithio-bis(5-nitropyridine) (0.075 g, 0.242 mmol) in acetonitrile/dichloroethane (3:1, 1.25 mL) were added successively. To the resulting solution triphenylphosphine (0.064 g, 0.242 mmol) in acetonitrile (0.6 ml) was added. The reaction mixture turned bright orange in color. The solution was agitated briefly using a wrist-action shaker (5 mins). Long chain alkyl amine-CPG (CLAA-CPG) (1.5 g, 61 mM) was added. The suspension was agitated for 2 h. The CPG was filtered through a sintered funnel and washed with acetonitrile, dichloromethane and ether successively. Unreacted amino groups were masked using acetic anhydride/hyridine. The achieved loading of the CPG was measured by taking UV measurement (37 mM/g).

[0222] The synthesis of siRNAs bearing a 5′-12-dodecanoic acid bisdecylamide group (herein referred to as “5′-C32-”) or a 5′-cholesteryl derivative group (herein referred to as “5′-Chol-”) was performed as described in WO 2004/065601, except that, for the cholesteryl derivative, the oxidation step was performed using the Beaucage reagent in order to introduce a phosphorothioate linkage at the 5′-end of the nucleic acid oligomer.

[0223] Nucleic acid sequences are represented below using standard nomenclature, and specifically the abbreviations of Table 4.

TABLE 4
Abbreviations of nucleotide monomers used in nucleic acid sequence
representation. It will be understood that these monomers, when present
in an oligonucleotide, are mutually linked by 5′-3′-phosphodiester bonds.

| Abbreviation³ | Nucleotide (s) |
|---|---|
| A, a | 2′-deoxy-adenosine-5′-phosphate, adenosine-5′- |
| | phosphate |
| C, c | 2′-deoxy-cytidine-5′-phosphate, cytidine-5′- |
| | phosphate |
| G, g | 2′-deoxy-guanosino-5′-phosphate, guanosine-5′- |
| | phosphate |
| T, t | 2′-deoxy-thymidine-5′-phosphate, thymidine-5′- |
| | phosphate |
| U, u | 2′-deoxy-uridine-5′-phosphate, uridine-5′-phosphate |
| N, n | any 2′-deoxy-nucleotide/nucleotide |
| | (G, A, C, or T, g, a, c or u) |
| Am | 2′-O-methyladenosine-5′-phosphate |
| Cm | 2′-O-methylcytidine phosphate |
| Gm | 2′-O-methylguanosine-5′-phosphate |
| Tm | 2′-O-methyl-thymidine-5′-phosphate |
| Um | 2′-O-methyluridine-5′-phosphate |
| Af | 2′-fluoro-2′-deoxy-adenosine-5′-phosphate |
| Cf | 2′-fluoro-2′-deoxy-cytidine-5′-phosphate |
| Gf | 2′-fluoro-2′-deoxy-guanosine-5′-phosphate |
| Tf | 2′-fluoro-2′-deoxy-thymidine-5′-phosphate |
| Uf | 2′-fluoro-2′-deoxy-uridine-5′-phosphate |
| A, C, G, T, U, | underlined: nucleoside-5′-phosphorothioate |
| a, c, g, t, u | |
| am, cm, gm, tm, | underlined: 2-O-methyl-nucleoside-5′-phosphorothioate |
| um | |

³capital letters represent 2′-deoxribonucletides (DNA), lower case letters represent ribonucleotides (RNA)

[0224] dsRNA Expression Vectors

[0225] In another aspect of the invention , Eg5 specific dsRNA molecules that modulate Eg5 gene expression activity are expressed from transcription units inserted into DNA or RNA vectors (see, e.g., Couture, A, et al., EIG. (1996), 12:5-10; Skillern, A., et al., International PCT Publication No. WO 00/22113, Conrad, International PCT Publicatoin No. WO 00/22114, and Conrad, U.S. Pat. No. 6,054,299). These transgenes can be introduced as a linear construct, a circular plasmid, or a viral vector, which can be incorporated and inherited as a transgene integrated into the host genome. The transgene can also be constructed to permit it to be inherited as an extrachromosomal plasmid (Gassmann, et al., Proc. Natl. Acad. Sci. USA (1995) 92:1292).

[0226] The individual strands of a dsRNA can be transcribed by promoters on two separate expression vectors and co-transfected into a target cell. Alternatively each individual strand of the dsRNA can be transcribed by promoters both of which are located on the same expression plasmid. In preferred embodiment, a dsRNA is expressed as an inverted repeat joined by a linker polynucleotide sequence such that the dsRNA has a stem and loop structure.

[0227] The recombination dsRNA expression vectors are generally DNA plasmids or viral vectors. dsRNA expressing viral vectors can be constructed based on, but not limited to, adeno-associated virus (for a review, see Muzyezka, et al., Curr. Topics Micro. Immunol. (1992) 158:97-129)); adenovirus (see, for example, Berkner, et al., BioTechniques (1998) 6:616), Rosenfeld et al. (1991, Science 252:431-434), and Rosenfeld et al. (1992), Cell 68:143-155)); or alphavirus as well as others known in the art. Retroviruses have been used to introduce a viariety of genes into many different cell types, including epithelial cells, in vitro and/or in vivo and/or in vivo (see, e.g., Eglitis, et al., Science (1985) 230:1395-1398; Danos and Mulligan, Proc. Natl. Acad. Sci. USA (1998) 85:6460-6464; Wilson et al., 1988, Proc. Natl. Acad. Sci. USA 85:3014-3018; Armentano et al., 1990, Proc. NatI. Acad. Sci. USA 87:61416145; Huber et al., 1991, Proc. NatI. Acad. Sci. USA 88:8039-8043; Ferry et al., 1991, Proc. NatI. Acad. Sci. USA 88:8377-8381; Chowdhury et al., 1991, Science 354:1802-1805; van Beusechem. et al., 1992, Proc. Nad. Acad. Sci. USA 89:7640-19; Kay et al., 1992, Human Gene Therapy 3:641-647; Dai et al., 1992, Proc. Natl. Acad. Sci. USA 89:10892-10895; Hwu et al., 1993, J. Ummunol. 150:4104-4115; U.S. Pat. No. 4,868,116; U.S. Pat. No. 4,980,286; PCT Application WO 89/07136; PCT Application WO 89/02468; PCT Application WO 89/05344; and PCT Application WO 92/07573). Recombinant retroviral vectors capable of transducing and expressing genes inserted into the genome of a cell can be produced by transfecting the recombinant retroviral genome into suitable packaging cell lines such as PA317 and Psi-CRIP (Comette et al., 1991, Human Gene Therapy 2:5-10; Cone et al., 1984, Proc. Natl. Acad. Sci. USA 81:6349). Recombinant adenoviral vectors can be used to infect a wide variety of cells and tissues in susceptible hosts (e.g., rat, hamster, dog, and chimpanzec) (Hsu et al., 1992, J. Invectious Disease, 166:769), and also have the advantage of not requiring mitotically active cells for infection.

[0228] The promoter driving dsRNA expression in either a DNA plasmid or viral vector of the invention may be a eukaryotic RNA polymerase I (e.g. ribosomal RNA promoter), RNA polymerase II (e.g. CNV early promoter or actin promoter or U1 snRNA promoter) or generally RNA polymerase III prometer (e.g. U6 snRNA or 7SK RNA promoter) or a prokaryotic promoter, for example the T7 promoter, provided the expression plasmid also encodes T7 RNA polymerase required for transcription from a T7 Promoter. The promoter can also direct transgene expression to the pancreas (see, e.g. the insulin regulatory sequence for pancreas (Bucchini et al., 1986, Proc, Natl. Acad. Sci. USA 83:2511-2515)).

[0229] In addition, expression of the transgene can be precisely regulated, for example, by using an inducible regulatory sequence and expression systems such as a regulatory sequence that is sensitive to certain physiological regulators, e.g., circulating glucose levels, or hormones (Docherty et al., 1994, FASWV J. 8:20-24). Such inducible expression systems, suitable for the control of transgene expression in cells or in mammals include regulation by ecdysone, by estrogen, progesterone, tetracycline, chemical inducers of dierization, and isopropyl-beta-D1-thiogalactopyranoside (EPTG). A person skilled in the art would be able to choose the appropriate regulatory/promoter sequence based on the intended use of the dsRNA transgene.

[0230] Generally, recombinant vectors capable of expressing dsRNA molecules are delivered as described below, and persist in target cells. Alternatively, viral vectors can be used that provide for transient expression of dsRNA molecules. Such vectors can be repeatedly administered as necessary. Once expressed, the dsRNAs bind to target RNA and modulate its function or expression. Delivery of dsRNA expressing vectors can be systemic, such as by intravenous or intramuscular administration, by administration to target cells ex-planted from the patient followed by reintroduction into the patient, or by any other means that allows for introduction into a desired target cell.

[0231] dsRNA expression DNA plasmids are typically transfected into target cells as a complex with cationic lipid carriers (e.g., Oligofectamine) or non-cationic lipid-based carriers (e.g. Transit-TKO™). Multiple lipid transfections for dsRNA-mediated knockdowns targeting different regions of a single Eg5 gene or multiple Eg5 genes over a period of a week or more are also contemplated by the invention. Successful introduction of the vectors of the invention into host cells can be monitored using various known methods. For example, transient transfection, can be signaled with a reporter, such as a flourescent marker, such as Green Fluorescent Protein (GFP). Stable transfection of ex vivo cells can be ensured using markers that provide the transfected cell with resistance to specific environmental factors (e.g., antibiotics and drugs), such as hygromycin B resistance.

[0232] The Eg5 dsRNA molecules can also be inserted into vectors and sued as gene therapy vectors for human patients. Gene therapy vectors can be delivered to a subject by, for example, intravenous injection, local administration (see U.S. Pat. No. 5,328,470) or by stereotactic injection (see e.g., Chen et al. (1994) Proc. Natl. Acad. Sci. USA 91:3045-3057). The pharmaceutical preparation of the gene therapy vector can include the gene therapy vector in an acceptable diluent, or can comprise a slow release matrix in which the gene delivery vehicle is imbedded. Alternatively, where the complete gene delivery vector can be produced intact from recombinant cells, e.g., retroviral vectors, the pharmaceutical preparation can include one or more cells which produce the gene delivery system.

[0233] Eg5 siRNA in vitro Screening via Cell Proliferation

[0234] As silencing of Eg5 has been shown to cause mitotic arrest (Weil, D, et al [2002] Biotechniques 33: 1244-8), a cell viability assay was used for siRNA activity screening. HeLa cells (14000 per well [Screens 1 and 3] or 10000 per well [Screen2])) were seeded in 96-well plates and simultaneously transfected with Lipofectamine 2000 (Invitrogen) at a final siRNA concentration in the well of 30 nM and at final concentrations of 50 nM (1^{st} screen) and 25 nM (2^{nd} screen). A subset of duplexes was tested at 25 nM in a third screen (Table 5).

[0235] Seventy-two hours post-transfection, cell proliferation was assayed the addition of WST-1 reagent (Roche) to the culture medium, and subsequent absorbance measurement at 450 nm. The absorbance value for control (non-transfected) cells was considered 100 percent, and absorbances for the siRNA transfected wells were compared to the control value. Assays were performed in sextuplicate for each of three screens. A subset of the siRNAs was further tested at a range of siRNA concentrations. Assays were performed in HeLa cells (14000 per well; method same as above, Table 5).

TABLE 5

| | Relative absorbance | | | | | |
|---|---|---|---|---|---|---|
| | at 450 nm | | | | | |
| | Screen I | | Screen II | | Screen III | |
| Duplex | mean | sd | Mean | sd | mean | Sd |
| AL-DP-6226 | 20 | 10 | 28 | 11 | 43 | 9 |
| AL-DP-6227 | 66 | 27 | 96 | 41 | 108 | 33 |
| AL-DP-6228 | 56 | 28 | 76 | 22 | 78 | 18 |
| AL-DP-6229 | 17 | 3 | 31 | 9 | 48 | 13 |
| AL-DP-6230 | 48 | 8 | 75 | 11 | 73 | 7 |
| AL-DP-6231 | 8 | 1 | 21 | 4 | 41 | 10 |
| AL-DP-6232 | 16 | 2 | 37 | 7 | 52 | 14 |
| AL-DP-6233 | 31 | 9 | 37 | 6 | 49 | 12 |
| AL-DP-6234 | 103 | 40 | 141 | 29 | 164 | 45 |
| AL-DP-6235 | 107 | 34 | 140 | 27 | 195 | 75 |
| AL-DP-6236 | 48 | 12 | 54 | 12 | 56 | 12 |
| AL-DP-6237 | 73 | 14 | 108 | 18 | 154 | 37 |
| AL-DP-6238 | 64 | 9 | 103 | 10 | 105 | 24 |
| AL-DP-6239 | 9 | 1 | 20 | 4 | 31 | 11 |
| AL-DP-6240 | 99 | 7 | 139 | 16 | 194 | 43 |
| AL-DP-6241 | 43 | 9 | 54 | 12 | 66 | 19 |
| AL-DP-6242 | 6 | 1 | 15 | 7 | 36 | 8 |
| AL-DP-6243 | 7 | 2 | 19 | 5 | 33 | 13 |
| AL-DP-6244 | 7 | 2 | 19 | 3 | 37 | 13 |
| AL-DP-6245 | 25 | 4 | 45 | 10 | 58 | 9 |
| AL-DP-6246 | 34 | 8 | 65 | 10 | 66 | 13 |
| AL-DP-6247 | 53 | 6 | 78 | 14 | 105 | 20 |
| AL-DP-6248 | 7 | 0 | 22 | 7 | 39 | 12 |
| AL-DP-6249 | 36 | 8 | 48 | 13 | 61 | 7 |

[0236] The nine siRNA duplexes that showed the greatest growth inhibition in Table 5 were re-tested at a range of siRNA concentrations in HeLa cells. The siRNA concentrations tested were 100 nM, 33.3 nM, 11.1 nM, 3.70 nM, 1.23 nM, 0.41 nM and 0.046 nM. Assays were performed in sextuplicate, and the concentration of each siRNA resulting in fifty percent inhibition of cell proliferation (IC₅₀) was calculated. This dose-response analysis was performed between two and four times for each duplex. Mean IC₅₀ values (nM) are given in Table 6.

TABLE 6

| Duplex | Mean IC₅₀ |
|---|---|
| AL-DP-6226 | 15.5 |
| AL-DP-6229 | 3.4 |
| AL-DP-6231 | 4.2 |
| AL-DP-6232 | 17.5 |
| AL-DP-6239 | 4.4 |
| AL-DP-6242 | 5.2 |
| AL-DP-6243 | 2.6 |
| AL-DP-6244 | 8.3 |
| AL-DP-6248 | 1.9 |

[0237] Eg5 siRNA in vitro Screening via Cell Proliferation

[0238] Directly before transfection, Hela S3 (ATCC-Number: CCL-2:2, LCG Promochem GmbH, Wesel, Germany) cells were seeded at 1.5×10⁴ cells/well on 96-well plates (Greiner Bio-One GmbH, Frickenhausen, Germany) in 75 μl of growth medium (Ham's F12, 10% fetal calf serum, 100 u penicillin/100 μg/ml streptomycin, all from Biochrom AG, Berlin, Germany). Transfections were performed in quadruplicates. For each well 0.5 μl Lipofectamine2000 (Invitrogen GmbH, Darlsruhe, Germany) were mixed with 12 μl Opti-MEM (Invitrogen) and incubated for 15 min at room temperature. For the siRNA concentration being 50 nM in the 100 μl transfection volume, 1 μl of a 5 μM siRNA were mixed with 11.5 μl Opti-MEM per well, combined with the Lipofectamine2000-Opti-MEM mixture and again incubated for 15 minutes at room temperature, siRNA-Lipofectamine2000-complexes were applied completely (25 μl each per well) to the cells and cells were incubated for 24 h at 37° C. and 5% CO₂ in a humidified incubator (Heracus GmbH, Hanau). The single dose screen was done once at 50 nM and at 25 nM, respectively.

[0239] Cells were harvested by applying 50 μl of lysis mixture (content of the QuantiGene bDNA-kit from Genospectra, Fremont, USA) to each well containing 100 μl of growth medium and were lysed at 53° C. for 30 min. Afterwards, 50 μl of the lysates were incubated with probesets specific to human Eg5 and human GAPDH and proceeded according to the manufacturer's protocol for QuantiGene. In the end chemoluminescence was measured in a Victor2-Light (Perkin Elmer, Wiesbaden, Germany) as RLUs (relative light units) and values obtained with the hEg5 probeset were normalized to the respective GAPDH values for each well. Values obtained with siRNAs directed against Eg5 were related to the value obtained with an unspecific siRNA (directed against HCV) which was set to 100% (Tables 1, 2, and 3).

[0240] Effective siRNAs from the screen were further characterized by dose response curves. Transfections of dose response curves were performed at the following concentrations: 100 nM, 16.7 nM, 2.8 nM, 0.46 nM, 77 picoM, 12.8 picoM, 2.1 picoM, 0.35 picoM, 59.5 fM, 9.9 fM and mock (no siRNA) and diluted with Opti-MEM to a final concentration of 12.5 μl according to the above protocol. Data analysis was performed by using the Microsoft Excel add-in software XL-fit 4.2 (IDBS, Guildford, Surrey, UK) and applying the dose response model number 205 (Tables 1, 2 and 3).

[0241] The lead siRNA AD12115 was additionally analyzed by applying the WST-proliferation assay from Roche (as previously described).

[0242] A subset of 34 duplexes from Table 2 that showed greatest activity was assayed by transfection in HeLa cells at final concentrations ranging from 100 nM to 10 fM. Transfections were performed in quadruplicate. Two dose-response assays were performed for each duplex. The concentration giving 20% (IC20), 50% (IC50) and 80% (IC80) reduction of KSP mRNA was calculated for each duplex. (Table 7).

TABLE 7
Concentrations given in pM

| | IC20s | | IC50s | | IC80s | |
|---|---|---|---|---|---|---|
| Duplex name | 1^{st} screen | 2^{nd} screen | 1st screen | 2nd screen | 1st screen | 2nd screen |
| AD12077 | 1.19 | 0.80 | 6.14 | 10.16 | 38.36 | 76.16 |
| AD12078 | 25.43 | 25.43 | 156.18 | 156.18 | ND | ND |
| AD12085 | 9.08 | 1.24 | 40.57 | 8.52 | 257.68 | 81.26 |
| AD12095 | 1.03 | 0.97 | 9.84 | 4.94 | 90.31 | 60.47 |
| AD12113 | 4.00 | 5.94 | 17.18 | 28.14 | 490.83 | 441.30 |
| AD12115 | 0.60 | 0.41 | 3.79 | 3.39 | 23.45 | 23.45 |
| AD12125 | 31.21 | 22.02 | 184.28 | 166.15 | 896.85 | 1008.11 |
| AD12134 | 2.59 | 5.51 | 17.87 | 22.00 | 116.36 | 107.03 |
| AD12149 | 0.72 | 0.50 | 4.51 | 3.91 | 30.29 | 40.89 |
| AD12151 | 0.53 | 6.84 | 4.27 | 10.72 | 22.88 | 43.01 |
| AD12152 | 155.45 | 7.56 | 867.36 | 66.69 | 13165.27 | ND |
| AD12157 | 0.30 | 26.23 | 14.60 | 92.08 | 14399.22 | 693.31 |
| AD12166 | 0.20 | 0.93 | 3.71 | 3.86 | 46.28 | 20.59 |
| AD12180 | 28.85 | 28.85 | 101.06 | 101.06 | 847.21 | 847.21 |
| AD12185 | 2.60 | 0.42 | 15.55 | 13.91 | 109.80 | 120.63 |
| AD12194 | 2.08 | 1.11 | 5.37 | 5.09 | 53.03 | 30.92 |
| AD12211 | 5.27 | 4.52 | 11.73 | 18.93 | 26.74 | 191.07 |
| AD12257 | 4.56 | 5.20 | 21.68 | 22.75 | 124.69 | 135.82 |
| AD12280 | 2.37 | 4.53 | 6.89 | 20.23 | 64.80 | 104.82 |
| AD12281 | 8.81 | 8.65 | 19.68 | 42.89 | 119.01 | 356.08 |
| AD12282 | 7.71 | 456.42 | 20.09 | 558.00 | ND | ND |
| AD12285 | ND | 1.28 | 57.30 | 7.31 | 261.79 | 42.53 |
| AD12292 | 40.23 | 12.00 | 929.11 | 109.10 | ND | ND |
| AD12252 | 0.02 | 18.63 | 6.35 | 68.24 | 138.09 | 404.91 |
| AD12275 | 25.76 | 25.04 | 123.89 | 133.10 | 1054.54 | 776.25 |
| AD12266 | 4.85 | 7.80 | 10.00 | 32.94 | 41.67 | 162.65 |
| AD12267 | 1.39 | 1.21 | 12.00 | 4.67 | 283.03 | 51.12 |
| AD12264 | 0.92 | 2.07 | 8.56 | 15.12 | 56.36 | 196.78 |
| AD12268 | 2.29 | 3.67 | 22.16 | 25.64 | 258.27 | 150.84 |
| AD12279 | 1.11 | 28.54 | 23.19 | 96.87 | 327.28 | 607.27 |
| AD12256 | 7.20 | 33.52 | 46.49 | 138.04 | 775.54 | 1076.76 |
| AD12259 | 2.16 | 8.31 | 8.96 | 40.12 | 50.05 | 219.42 |
| AD12276 | 19.49 | 6.14 | 89.60 | 59.60 | 672.51 | 736.72 |
| AD12321 | 4.67 | 4.91 | 24.88 | 19.43 | 139.50 | 89.49 |

ND-not determined

[0243] Silencing of liver Eg5/KSP in Juvenile Rats Following Single-Bolus Administration of LNP01 Formulated siRNA

[0244] From birth until approximately 23 days of age, Eg5/KSP expression can be detected in the growing rat liver. Target silencing with a formulated Eg5/KSP siRNA was evaluated in juvenile rats.

[0245] KSP Duplex Tested

| | | | |
|---|---|---|---|
| Duplex ID | Target | Sense | Antisense |

| | | | |
|---|---|---|---|
| AD6248 | VEGF | AccGAAGuGuuGuuuGuccTsT | GGAcAAAcAAcACUUCGGUTsT |
| | | (SEQ ID NO:1238) | (SEQ ID NO:1239) |

[0246] Methods

[0247] Dosing of animals. Male, juvenile Sprague-Dawley rats (19 days old) were administered single doses of lipidoid (“LNP01”) formulated siRNA via tail vein injection. Groups of ten animals received doses of 10 milligrams per kilogram (mg/kg) bodyweight of either AD6248 or an unspecific siRNA. Dose level refers to the amount of siRNA duplex administered in the formulation. A third group received phosphate-buffered saline. Animals were sacrificed two days after siRNA administration. Livers were dissected, flash frozen in liquid Nitrogen and pulverized into powders.

[0248] mRNA measurements. Levels of Eg5/KSP mRNA were measured in livers from all treatment groups. Samples of each liver powder (approximately ten milligrams) were homogenized in tissue lysis buffer containing proteinase K. Levels of Eg5/KSP and GAPDH mRNA were measured in triplicate for each sample using the Quantigene branched DNA assay (GenoSpectra). Mean values for Eg5/KSP were normalized to mean GAPDH values for each sample. Group means were determined and normalized to the PBS group for each experiment.

[0249] Statistical analysis. Significance was determined by ANOVA followed by the Tukey post-hoc test

[0250] Results

[0251] Data Summary

[0252] Mean values (±standard deviation) for Eg5/KSP mRNA are given. Statistical significance (p value) versus the PBS group is shown (ns, not significant [p>0.05]).

[0253] Experiment 1

| | | VEGF/GAPDH | p value |
|---|---|---|---|
| PBS | | 1.0 ± 0.47 | |
| AD6248 | 10 mg/kg | 0.47 ± 0.12 | <0.001 |
| unspec | 10 mg/kg | 1.0 ± 0.26 | ns |

[0254] A statistically significant reduction in liver Eg5/KSP mRNA was obtained following treatment with formulated AD6248 at a dose of 10 mg/kg.

[0255] Silencing of Rat Liver VEGF Following Intravenous Infusion of LNP01 Formulated siRNA Duplexes

[0256] A “lipidoid” formulation comprising an equimolar mixture of two siRNAs was administered to rats. One siRNA (AD3133) was directed towards VEGF. The other (AD12115) was directed towards Eg5/KSP. Since Eg5/KSP expression is nearly undetectable in the adult rat liver, only VEGF levels were measured following siRNA treatment.

[0257] siRNA Duplexes Administered

| | | | |
|---|---|---|---|
| Duplex ID | Target | Sense | Antisense |

| | | | |
|---|---|---|---|
| AD12115 | Eg5/KSP | ucGAGAAucuAAAcuAAcuTsT | AGUuAGUUuAGAUUCUCGATsT |
| | | (SEQ ID NO:1240) | (SEQ ID NO:1241) |
| AD3133 | VEGF | GcAcAuAGGAGAGAuGAGCUsU | AAGCUcAUCUCUCCuAuGuG |
| | | (SEQ ID NO:1242) | CusG |
| | | | (SEQ ID NO:1243) |

Key: A, G, C, U - ribonucleotides; c, u - 2′-O-Me ribonucleotides; s-phorphorothioate.

[0258] Methods

[0259] Dosing of animals. Adult, female Sprague-Dawley rats were administered lipidoid (“LNP01”) formulated siRNA by a two-hour infusion into the femoral vein. Groups of four animals received doses of 5, 10 and 15 milligrams per kilogram (mg/kg) bodyweight of formulated siRNA. Dose level refers to the total amount of siRNA duplex administered in the formulation. A fourth group received phosphate-buffered saline. Animals were sacrificed 72 hours after the end of the siRNA infusion. Livers were dissected, flash frozen in liquid Nitrogen and pulverized into powders.

[0260] Formulation Procedure

[0261] The lipidoid ND98-4HCl (MW 1487) (Formula 1), Cholesterol (Sigma-Aldrich), and PEG-Ceramide C16 (Avanti Polar Lipids) were used to prepare lipid-siRNA nanoparticles. Stock solutions of each in ethanol were prepared: ND98, 133 mg/mL; Cholesterol, 25 mg/mL, PEG-Ceramide C16, 100 mg/mL. ND98, Cholesterol, and PEG-Ceramide C16 stock solutions were then combined in a 42:48:10 molar ratio. Combined lipid solution was mixed rapidly with aqueous siRNA (in sodium acetate pH 5) such that the final ethanol concentration was 35-45% and the final sodium acetate concentration was 100-300 mM. Lipid-siRNA nanoparticles formed spontaneously upon mixing. Depending on the desired particle size distribution, the resultant nanoparticle mixture was in some cases extruded through a polycarbonate membrane (100 nm cut-off) using a thermobarrel extruder (Lipex Extruder, Northern Lipids, Inc). In other cases, the extrusion step was omitted. Ethanol removal and simultaneous buffer exchange was accomplished by either dialysis or tangential flow filtration. Buffer was exchanged to phosphate buffered saline (PBS) pH 7.2.

[chemical structure]

[0262] Characterization of Formulations

[0263] Formulations prepared by either the standard or extrusion-free method are characterized in a similar manner. Formulations are first characterized by visual inspection. They should be whitish translucent solutions free from aggregates or sediment. Particle size and particle size distribution of lipid-nanoparticles are measured by dynamic light scattering using a Malvern Zetasizer Nano ZS (Malvern, USA). Particles should be 20-30 nm, and ideally, 40-100 nm in size. The particle size distribution should be unimodal. The total siRNA concentration in the formulation, as well as the entrapped fraction, is estimated using a dye exclusion assay. A sample of the formulated siRNA is incubated with the RNA-binding dye Ribogreen (Molecular Probes) in the presence or absence of a formulation disrupting surfactant, 0.5% Triton-X100. The total siRNA in the formulation is determined by the signal from the sample containing the surfactant, relative to a standard curve. The entrapped fraction is determined by subtracting the “free” siRNA content (as measured by the signal in the absence of surfactant) from the total siRNA content. Percent entrapped siRNA is typically >85%.

[0264] mRNA measurements. Samples of each liver powder (approximately ten milligrams) were homogenized in tissue lysis buffer containing proteinase K. Levels of VEGF and GAPDH mRNA were measured in triplicate for each sample using the Quantigene branched DNA assay (GenoSpectra). Mean values for VEGF were normalized to mean GAPDH values for each sample. Group means were determined and normalized to the PBS group for each experiment.

[0265] Protein measurements. Samples of each liver powder (approximately 60 milligrams) were homogenized in 1 ml RIPA buffer. Total protein concentrations were determined using the MicroBCA protein assay kit (Pierce). Samples of total protein from each animal was used to determine VEGF protein levels using a VEGF ELISA assay (R&D systems). Group means were determined and normalized to the PBS group for each experiment.

[0266] Statistical analysis. Significance was determined by ANOVA followed by the Tukey post-hoc test

[0267] Results

[0268] Data Summary

[0269] Mean values (±standard deviation) for mRNA (VEGF/GAPDH) and protein (rel. VEGF) are shown for each treatment group. Statistical significance (p value) versus the PBS group for each experiment is shown.

| | VEGF/GAPDH | p value | rel VEGF | p value |
|---|---|---|---|---|
| PBS | 1.0 ± 0.17 | | 1.0 ± 0.17 | |
| 5 mg/kg | 0.74 ± 0.12 | <0.05 | 0.23 ± 0.03 | <0.001 |
| 10 mg/kg | 0.65 ± 0.12 | <0.005 | 0.22 ± 0.03 | <0.001 |
| 15 mg/kg | 0.49 ± 0.17 | <0.001 | 0.20 ± 0.04 | <0.001 |

[0270] Statistically significant reductions in liver VEGF mRNA and protein were measured at all three siRNA dose levels.

TABLE 1

| | sequence | | |
|---|---|---|---|
| | of total | | |
| position | 23 mer | | |
| in human | target | | |
| access. # | site | SEQ I | sense sequence (5′-3′) |
| 385-407 | ACCGAAGUGUUGUUUGUCCAAUU | 1 | cGAAGuGuuGuuuGuccAATsT |
| 347-369 | UAUGGUGUUUGGAGCAUCUACUA | 3 | uGGuGuuuGGAGcAucuAcTsT |
| 1078-1100 | AAUCUAAACUAACUAGAAUCCUC | 5 | ucuAAAcuAAcuAGAAuccTsT |
| 1067-1089 | UCCUUAUCGAGAAUCUAAACUAA | 7 | cuuAucGAGAAucuAAAcuTsT |
| 374-396 | GAUUGAUGUUUACCGAAGUGUUG | 9 | uuGAuGuuuAccGAAGuGuTsT |
| 205-227 | UGGUGAGAUGCAGACCAUUUAAU | 11 | GuGAGAuGcAGAccAuuuATsT |
| 1176-1198 | ACUCUGAGUACAUUGGAAUAUGC | 13 | ucuGAGuAcAuuGGAAuAuTsT |
| 386-408 | CCGAAGUGUUGUUUGUCCAAUUC | 15 | GAAGuGuuGuuuGuccAAuTsT |
| 416-438 | AGUUAUUAUGGGCUAUAAUUGCA | 17 | uuAuuAuGGGcuAuAAuuGTsT |
| 485-507 | GGAAGGUGAAAGGUCACCUAAUG | 19 | AAGGuGAAAGGucAccuAATsT |
| 476-498 | UUUUACAAUGGAAGGUGAAAGGU | 21 | uuAcAAuGGAAGGuGAAAGTsT |
| 486-508 | GAAGGUGAAAGGUCACCUAAUGA | 23 | AGGuGAAAGGucAccuAAuTsT |
| 487-509 | AAGGUGAAAGGUCACCUAAUGAA | 25 | GGuGAAAGGucAccuAAuGTsT |
| 1066-1088 | UUCCUUAUCGAGAAUCUAAACUA | 27 | ccuuAucGAGAAucuAAAcTsT |
| 1256-1278 | AGCUCUUAUUAAGGAGUAUACGG | 29 | cucuuAuuAAGGAGuAuAcTsT |
| 2329-2351 | CAGAGAGAUUCUGUGCUUUGGAG | 31 | GAGAGAuucuGuGcuuuGGTsT |
| 1077-1099 | GAAUCUAAACUAACUAGAAUCCU | 33 | AucuAAAcuAAcuAGAAucTsT |
| 1244-1266 | ACUCACCAAAAAAGCUCUUAUUA | 35 | ucAccAAAAAAGcucuuAuTsT |
| 637-659 | AAGAGCUUUUUGAUCUUCUUAAU | 37 | GAGcuuuuuGAucuucuuATsT |
| 1117-1139 | GGCGUACAAGAACAUCUAUAAUU | 39 | cGuAcAAGAAcAucuAuAATsT |
| 373-395 | AGAUUGAUGUUUACCGAAGUGUU | 41 | AuuGAuGuuuAccGAAGuGTsT |
| 1079-1101 | AUCUAAACUAACUAGAAUCCUCC | 43 | cuAAAcuAAcuAGAAuccuTsT |
| 383-405 | UUACCGAAGUGUUGUUUGUCCAA | 45 | AccGAAGuGuuGuuuGuccTsT |
| 200-222 | GGUGGUGGUGAGAUGCAGACCAU | 47 | uGGuGGuGAGAuGcAGAccTsT |

| | | | | single | |
|---|---|---|---|---|---|
| | | | | dose | SDs 2nd |
| | | | | screen @ | screen |
| position | | | | 25 nM [% | (among |
| in human | | | duplex | residual | quadrupli- |
| access. # | SEQ I | antisense sequence (5′-3′) | name | mRNA] | cates) |
| 385-407 | 2 | UUGGAcAAAcAAcACUUCGTsT | [chemical structure] | 23% | 3% |
| 347-369 | 4 | GuAGAUGCUCcAAAcACcATsT | AL-DP-6227 | 69% | 10% |
| 1078-1100 | 6 | GGAUUCuAGUuAGUUuAGATsT | AL-DP-6228 | 33% | 2% |
| 1067-1089 | 8 | AGUUuAGAUUCUCGAuAAGTsT | [chemical structure] | 2% | 2% |
| 374-396 | 10 | AcACUUCGGuAAAcAUcAATsT | AL-DP-6230 | 66% | 11% |
| 205-227 | 12 | uAAAUGGUCUGcAUCUcACTsT | [chemical structure] | 17% | 1% |
| 1176-1198 | 14 | AuAUUCcAAUGuACUcAGATsT | [chemical structure] | 9% | 3% |
| 386-408 | 16 | AUUGGAcAAAcAAcACUUCTsT | AL-DP-6233 | 24% | 6% |
| 416-438 | 18 | cAAUuAuAGCCcAuAAuAATsT | AL-DP-6234 | 91% | 2% |
| 485-507 | 20 | UuAGGUGACCUUUcACCUUTsT | AL-DP-6235 | 112% | 4% |
| 476-498 | 22 | CUUUcACCUUCcAUUGuAATsT | AL-DP-6236 | 69% | 4% |
| 486-508 | 24 | AUuAGGUGACCUUUcACCUTsT | AL-DP-6237 | 42% | 2% |
| 487-509 | 26 | cAUuAGGUGACCUUUcACCTsT | AL-DP-6238 | 45% | 2% |
| 1066-1088 | 28 | GUUuAGAUUCUCGAuAAGGTsT | [chemical structure] | 2% | 1% |
| 1256-1278 | 30 | GuAuACUCCUuAAuAAGAGTsT | AL-DP-6240 | 48% | 2% |
| 2329-2351 | 32 | CcAAAGcAcAGAAUCUCUCTsT | AL-DP-6241 | 41% | 2% |
| 1077-1099 | 34 | GAUUUuAGUuAGUUuAGAUTsT | [chemical structure] | 8% | 2% |
| 1244-1266 | 36 | AuAAGAGCUUUUUUGGUGATsT | [chemical structure] | 7% | 1% |
| 637-659 | 38 | uAAGAAGAUcAAAAAGCUCTsT | [chemical structure] | 6% | 2% |
| 1117-1139 | 40 | UuAuAGAUGUUCUUGuACGTsT | AL-DP-6245 | 12% | 2% |
| 373-395 | 42 | cACUUCGGuAAAcAUcAAUTsT | AL-DP-6246 | 28% | 3% |
| 1079-1101 | 44 | AGGAUUCuAGUuAGUUuAGTsT | AL-DP-6247 | 71% | 4% |
| 383-405 | 46 | GGAcAAAcAAcACUUCGGUTsT | [chemical structure] | 5% | 2% |
| 200-222 | 48 | GGUCUGcAYCUcACcACcATsT | AL-DP-6249 | 28% | 3% |

[0271] TABLE 2

| | | | | |
|---|---|---|---|---|
| position | sequence of | | | |
| in human | total 19 mer | | | |
| access. # | target site | seqID | sense sequence (5′-3′) | seqID |

| | | | | |
|---|---|---|---|---|
| 829-847 | CAUACUCAUGUCGUUCCCA | 49 | cAuAcucuAGucGuucccATsT | 50 |
| 246-264 | AGCGCCCAUUCAAUAGUAG | 51 | AGcGcccAuucAAuAGuAGTsT | 52 |
| 238-256 | GGAAAGCUAGCGCCCAUUC | 53 | GGAAAGcuAGcGcccAuucTsT | 54 |
| 239-257 | GAAAGCUAGCGCCCAUUCA | 55 | GAAAGcuAGcGcccAuucATsT | 56 |
| 878-896 | AGAAACUACGAUUGAUGGA | 57 | AGAAAcuAcGAuuGAuGGATsT | 58 |
| 1064-1082 | UGUUCCUUAUCGAGAAUCU | 59 | uGuuccuuAucGAGAAucuTsT | 60 |
| 3278-3296 | CAGAUUACCUCUGCGAGCC | 61 | cAGAuuAccucuGcGAGccTsT | 62 |
| 247-265 | GCGCCCAUUCAAUAGUAGA | 63 | GcGcccAuucAAuAGuAGATsT | 64 |
| 434-452 | UUGCACUAUCUUUGCGUAU | 65 | uuGcAcuAucuuuGcGuAuTsT | 66 |
| 232-250 | CAGAGCGGAAAGCUAGCGC | 67 | cAGAGcGGAAAGcuAGcGcTsT | 68 |
| 1831-1849 | AGACCUUAUUUGGUAAUCU | 69 | AGAccuuAuuuGGuAAucuTsT | 70 |
| 1105-1123 | AUUCUCUUGGAGGGCGUAC | 71 | AuucucuuGGAGGGcGuAcTsT | 72 |
| 536-554 | GGCUGGUAUAAUUCCACGU | 73 | GGcuGGuAuAAuuccAcGuTsT | 74 |
| 236-254 | GCGGAAAGCUAGCGCCCAU | 75 | GcGGAAAGcuAGcGcccAuTsT | 76 |
| 435-453 | UGCACUAUCUUUGCGUAUG | 77 | uGcAcuAucuuuGcGuAuGTsT | 78 |
| 541-559 | GUAUAAUUCCACGUACCCU | 79 | GuAuAAuuccAcGuAcccuTsT | 80 |
| 1076-1094 | AGAAUCUAAACUAACUAGA | 81 | AGAAucuAAAcuAAcuAGATsT | 82 |
| 1432-1450 | AGGAGCUGAAUAGGGUUAC | 83 | AGGAGcuGAAuAGGGuuAcTsT | 84 |
| 1821-1839 | GAAGUACAUAAGACCUUAU | 85 | GAAGuAcAuAAGAccuuAuTsT | 86 |
| 2126-2144 | GACAGUGGCCGAUAAGAUA | 87 | GAcAGuGGccGAuAAGAuATsT | 88 |
| 2373-2391 | AAACCACUUAGUAGUGUCC | 89 | AAAccAcuuAGuAGuGuccTsT | 90 |
| 4026-4044 | UCCCUAGACUUCCCUAUUU | 91 | ucccuAGAcuucccuAuuuTsT | 92 |
| 4030-4048 | UAGACUUCCCUAUUUCGCU | 93 | uAGAcuucccuAuuucGcuTsT | 94 |
| 144-162 | GCGUCGCAGCCAAAUUCGU | 95 | GcGucGcAGccAAAuucGuTsT | 96 |
| 242-260 | AGCUAGCGCCCAUUCAAUA | 97 | AGcuAGcGcccAuucAAuATsT | 98 |
| 879-897 | GAAACUACGAUUGAUGGAG | 99 | GAAAcuAcGAuuGAuGGAGTsT | 100 |
| 2134-2152 | CCGAUAAGAUAGAAGAUCA | 101 | ccGAuAAGAuAGAAGAucATsT | 102 |
| 245-263 | UAGCGCCCAUUCAAUAGUA | 103 | uAGcGcccAuucAAuAGuATsT | 104 |
| 444-462 | UUUGCGUAUGGCCAAACUG | 195 | uuuGcGuAuGGccAAAcuGTsT | 106 |
| 550-568 | CACGUACCCUUCAUCAAAU | 107 | cAcGuAcccuucAucAAAuTsT | 108 |
| 442-460 | UCUUUGCGUAUGGCCAAAC | 109 | ucuuuGcGuAuGGccAAAcTsT | 110 |
| 386-440 | CCGAAGUGUUGUUUGUCCA | 111 | ccGAAGuGuuGuuuGuccATsT | 112 |
| 233-251 | AGAGCGGAAAGCUAGCGCC | 113 | AGAGcGGAAAGcuAGcGccTsT | 114 |
| 243-261 | GCUAGCGCCCAUUCAAUAG | 115 | GcuAGcGcccAuucAAuAGTsT | 116 |
| 286-304 | AAGUUAGUGUACGAACUGG | 117 | AAGuuAGuGuAcGAAcuGGTsT | 118 |
| 294-312 | GUACGAACUGGAGGAUUG | 119 | GuAcGAAcuGGAGGAuuGGTsT | 120 |
| 296-314 | ACGAACUGGAGGAUUGGCU | 121 | AcGAAcuGGAGGAuuGGcuTsT | 122 |
| 373-391 | AGAUUGAUGUUUACCGAAG | 123 | AGAuuGAuGuuuAccGAAGTsT | 124 |
| 422-440 | UAUGGGCUAUAAUUGCACU | 125 | uAuGGGcuAuAAuuGcAcuTsT | 126 |
| 441-459 | AUCUUUGCGUAUGGCCAAA | 127 | AucuuuGcGuAuGGccAAATsT | 128 |
| 832-850 | ACUCUAGUCGUUCCCACUC | 129 | AcucuAGucGuucccAcucTsT | 130 |
| 881-899 | AACUACGAUUGAUGGAGAA | 131 | AAcuAcGAuuGAuGGAGAATsT | 132 |
| 975-993 | GAUAAGAGAGCUCGGGAAG | 133 | GAuAAGAGAGcucGGGAAGTsT | 134 |
| 1073-1091 | UCGAGAAUCUAAACUAACU | 135 | ucGAGAAucuAAAcuAAcuTsT | 136 |
| 1084-1102 | AACUAACUAGAAUCCUCCA | 137 | AAcuAAcuAGAAuccuccATsT | 138 |
| 1691-1709 | GGAUCGUAAGAAGGCAGUU | 139 | GGAucGuAAGAAGGcAGuuTsT | 140 |
| 1693-1711 | AUCGUAAGAAGGCAGUUGA | 141 | AucGuAAGAAGGcAGuuGATsT | 142 |
| 1702-1720 | AGGCAGUUGACCAACACAA | 143 | AGGcAGuuGAccAAcAcAATsT | 144 |
| 2131-2149 | UGGCCGAUAAGAUAGAAGA | 145 | uGGccGAuAAGAuAGAAGATsT | 146 |
| 2412-2430 | UCUAAGGAUAUAGUCAACA | 147 | ucuAAGGAuAuAGucAAcATsT | 148 |
| 2859-2877 | ACUAAGCUUAAUUGCUUUC | 149 | AcuAAGcuuAAuuGcuuucTsT | 150 |
| 3294-3312 | GCCCAGAUCAACCUUUAAU | 151 | GcccAGAucAAccuuuAAuTsT | 153 |
| 223-241 | UUAAUUGGGCAGAGCGGAA | 153 | uuAAuuuGGcAGAGcGGAATsT | 154 |
| 1070-1088 | UUAUCGAGAAUCUAAACUA | 155 | uuAucGAGAAucuAAAcuATsT | 156 |
| 244-262 | CUAGCGCCCAUUCAAUAGU | 157 | cuAGcGcccAuucAAuAGuTsT | 158 |
| 257-275 | AAUAGUAGAAUGUGAUCCU | 159 | AAuAGuAGAAuGuGAuccuTsT | 160 |
| 277-295 | UACGAAAAGAAGUUAGUGU | 161 | uAcGAAAAGAAGuuAGuGuTsT | 162 |
| 284-302 | AGAAGUUAGUGUACGAACU | 163 | AGAAGuuAGuGuAcGAAcuTsT | 164 |
| 366-384 | ACUAAACAGAUUGAUGUUU | 165 | AcuAAAcAGAuuGAuGuuuTsT | 166 |
| 443-461 | CUUUGCGUAUGGCCAAACU | 167 | cuuuGcGuAuGGccAAAcuTsT | 168 |
| 504-522 | AAUGAAGAGUAUACCUGGG | 169 | AAuGAAGAGuAuAccuGGGTsT | 170 |
| 543-561 | AUAAUUCCACGUACCCUUC | 171 | AuAAuuccAcGuAcccuucTsT | 172 |
| 551-569 | ACGUACCCUUCAUCAAAUU | 173 | AcGuAcccuucAucAAAuuTsT | 174 |
| 552-570 | CGUACCCUUCAUCAAAUUU | 175 | cGuAcccuucAucAAAuuuTsT | 176 |
| 553-571 | GUACCCUUCAUCAAAUUUU | 177 | GuAcccuuuAucAAAuuuuTsT | 178 |
| 577-595 | AACUUACUGAUAAUGGUAC | 179 | AAcuuAcuGAuAAuGGuAcTsT | 180 |
| 602-620 | UUCAGUCAAAGUGUCUCUG | 181 | uucAGucAAAGuGucucuGTsT | 182 |
| 652-670 | UUCUUAAUCCAUCAUCUGA | 183 | uucuuAAuccAucAucuGATsT | 184 |
| 747-765 | ACAGUACACAACAAGGAUG | 185 | AcAGuAcAcAAcAAGGAuGTsT | 186 |
| 877-895 | AAGAAACUACGAUUGAUGG | 187 | AAGAAAcuAcGAuuGAuGGTsT | 188 |
| 880-898 | AAACUACGAUUGAUGGAGA | 189 | AAAcuAcGAuuGAuGGAGATsT | 190 |
| 965-983 | UGGAGCUGUUGAUAAGAGA | 191 | uGGAGcuGuuGAuAAGAGATsT | 192 |
| 1086-1104 | CUAACUAGAAUCCUCCAGG | 193 | cuAAcuAGAAuccuccAGGTsT | 194 |
| 1191-1209 | GAAUAUGCUCAUAGAGCAA | 195 | GAAuAuGcucAuAGAGcAATsT | 196 |
| 1195-1213 | AUGCUCAUAGAGCAAAGAA | 197 | AuGcucAuAGAGcAAAGAATsT | 198 |
| 1412-1430 | AAAAAUUGGUGCUGUUGAG | 199 | AAAAAuuGGuGcuGuuGAGTsT | 200 |
| 1431-1449 | GAGGAGCUGAAUAGGGUUA | 201 | GAGGAGcuGAAuAGGGuuATsT | 202 |
| 1433-1451 | GGAGCUGAAUAGGGUUACA | 203 | GGAGcuGAAuAGGGuuAcATsT | 204 |
| 1434-1452 | GAGCUGAAUAGGGUUACAG | 205 | GAGcuGAAuAGGGuuAcAGTsT | 206 |
| 1435-1453 | AGCUGAAUAGGGUUACAGA | 207 | AGcuGAAuAGGGuuAcAGATsT | 208 |
| 1436-1454 | GCUGAAUAGGGUUACAGAG | 209 | GcuGAAuAGGGuuAcAGAGTsT | 210 |
| 1684-1702 | CCAAACUGGAUCGUAAGAA | 211 | ccAAAcuGGAucGuAAGAATsT | 212 |
| 1692-1710 | GAUCGUAAGAAGGCAGUUG | 213 | GAucGuAAGAAGGcAGuuGTsT | 214 |
| 1833-1851 | ACCUUAUUUGGUAAUCUGC | 215 | AccuuAuuuGGuAAucuGcTsT | 216 |
| 1872-1890 | UUAGAUACCAUUACUACAG | 217 | uuAGAuAccAuuAcuAcAGTsT | 218 |
| 1876-1894 | AUACCAUUACUACAGUAGC | 219 | AuAccAuuAcuAcAGuAGcTsT | 220 |
| 1883-1901 | UACUACAGUAGCACUUGGA | 221 | uAcuAcAGuAGcAcuuGGATsT | 222 |
| 1987-2005 | AAAGUAAAACUGUACUACA | 223 | AAAGuAAAAcuGuAcuAcATsT | 224 |
| 2022-2040 | CUCAAGACUGAUCUUCUAA | 225 | cucAAGAcuGAucuucuAATsT | 226 |
| 2124-2142 | UUGACAGUGGCCGAUAAGA | 227 | uuGAcAGuGGccGAuAAGATsT | 228 |
| 2125-2143 | UGACAGUGGCCGAUAAGAU | 229 | uGAcAGuGGccGAuAAGAuTsT | 230 |
| 2246-2264 | GCAAUGGGGAAACCUAACU | 231 | GcAAuGuGGAAAccuAAcuTsT | 232 |
| 2376-2394 | CCACUUAGUAGUGGCCAGG | 233 | ccAcuuAGuAGuGuccAGGTsT | 234 |
| 2504-2522 | AGAAGGUACAAAAUUGGUG | 235 | AGAAGGuAcAAAAuuGGuuTsT | 236 |
| 2852-2870 | UGGUUUGACUAAGCUUAAG | 237 | uGGuuuGAcuAAGcuuAAuTsT | 238 |
| 2853-2871 | GGUUUGACUAAGCUUAAUG | 239 | GGuuuGAcuAAGcuuAAuuTsT | 240 |
| 3110-3128 | UCUAAGUCAAGAGCCAUCU | 241 | ucuAAGucAAGAGccAucuTsT | 242 |
| 3764-3782 | UCAUCCCUAUAGUUCACUU | 243 | ucAucccuAuAGuucAcuuTsT | 244 |
| 3765-3783 | CAUCCCUAUAGUUCACUUU | 245 | cAucccuAuAGuucAcuuuTsT | 246 |
| 4027-4045 | CCCUAGACUUCCCUAUUUC | 247 | cccuAGAcuucccuAuuucTsT | 248 |
| 4031-4049 | AGACUUCCCUAUUUCGCUU | 249 | AGAcuucccuAuuucGcuuTsT | 250 |
| 4082-4100 | UCACCAAACCAUUUGUAGA | 251 | ucAccAAAccAuuuGuAGATsT | 252 |
| 4272-4290 | UCCUUUAAGAGGCCUAACU | 253 | uccuuuAAGAGGccuAAcuTsT | 254 |
| 4275-4293 | UUUAAGAGGCCUAACUCAU | 255 | uuuAAGAGGccuAAcucAuTsT | 256 |
| 4276-4294 | UUAAGAGGCCUAACUCAUU | 257 | uuAAGAGGccuAAcucAuuTsT | 258 |
| 4282-4300 | GGCCUAACUCAUUCACCCU | 259 | GGccuAAcucAuucAcccuTsT | 260 |
| 4571-4589 | UGGUAUUUUUGAUCUGGCA | 261 | uGGuAuuuuuGAucuGGcATsT | 262 |
| 4677-4695 | AGUUUAGUGUGUAAAGUUU | 263 | AGuuuAGuGuGuAAAGuuuTsT | 264 |
| 152-170 | GCCAAAUUCGUCUGCGAAG | 265 | GccAAAuucGucuGcGAAGTsT | 266 |
| 156-174 | AAUUCGUCUGCGAAGAAGA | 267 | AAuucGucuGcGAAGAAGATsT | 268 |
| 491-509 | UGAAAGGUCACCUAAUGAA | 269 | uGAAAGGucAccuAAuGAATsT | 270 |
| 215-233 | CAGACCAUUUAAUUUGGCA | 271 | cAGAccAuuuAAuuuGGcATsT | 272 |
| 216-234 | AGACCAUUUAAUUUGGCAG | 273 | AGAccAuuuAAuuuGGcAGTsT | 274 |
| 416-434 | AGUUAUUAUGGGCUAUAAU | 275 | AGuuAuuAuGGGcuAuAAuTsT | 276 |
| 537-555 | GCUGGUAUAAUUCCACGUA | 277 | GcuGGuAuAAuuccAcGuATsT | 278 |
| 221-239 | AUUUAAUUUGGCAGAGCGG | 279 | AuuuAAuuuGGcAGAGcGGTsT | 280 |
| 222-240 | UUUAAUUUGGCAGAGCGGA | 281 | uuuAAuuuGGcAGAGcGGATsT | 282 |
| 227-245 | UUUGGCAGAGCGGAAAGCU | 283 | uuuGGcAGAGcGGAAAGcuTsT | 284 |
| 476-494 | UUUUACAAGGGAAGGUGAA | 285 | uuuuAcAAGGGAAGGuGAATsT | 286 |
| 482-500 | AAUGGAAGGUGAAAGGUCA | 287 | AAuGGAAGGuGAAAGGucATsT | 288 |
| 208-226 | UGAGAUGCAGACCAUUUAA | 289 | uGAGAuGcAGAccAuuuAATsT | 290 |
| 147-165 | UCGCAGCCAAAUUCGUCUG | 291 | ucGcAGccAAAuucGucuGTsT | 292 |
| 426-444 | GGCUAUAAUUGCACUAUCU | 293 | GGcuAuAAuuGcAcuAucuTsT | 294 |
| 2123-2141 | AUUGACAGUGGCCGAUAAG | 295 | AuuGAcAGuGGccGAuAAGTsT | 296 |
| 4029-4047 | CUAGACUUCCCUAUUUCGC | 297 | cuAGAcuucccuAuuucGcTsT | 298 |
| 438-456 | ACUAUCUUUGCGUAUGGCC | 299 | AcuAucuuuGcGuAuGGccTsT | 300 |
| 830-848 | AUACUCUAGUCGUUCCCAC | 301 | AuAcucuAGucGuucccAcTsT | 302 |
| 876-894 | AAAGAAACUACGAUUGAUG | 303 | AAAGAAAcuAcGAuuGAuGTsT | 304 |
| 115-133 | GCCUUGAUUUUUUGGCGGG | 305 | GccuuGAuuuuuuGGcGGGTsT | 306 |
| 248-266 | CGCCCAUUCAAUAGUAGAA | 307 | cGcccAuucAAuAGuAGAATsT | 308 |
| 1834-1852 | CCUUAUUUGGUAAUCUGCU | 309 | ccuuAuuuGGuAAucuGcuTsT | 310 |
| 3050-3068 | AGAGACAAUUCCGGAUGUG | 311 | AGAGAcAAuuccGGAuGuGTsT | 312 |
| 4705-4723 | UGACUUUGAUAGCUAAAUU | 313 | uGAcuuuGAuAGcuAAAuuTsT | 314 |
| 229-247 | UGGCAGAGCGGAAAGCUAG | 315 | uGGcAGAGcGGAAAGcuAGTsT | 316 |
| 234-252 | GAGCGGAAAGCUAGCGCCC | 317 | GAGcGGAAAGcuAGcGcccTsT | 318 |
| 282-300 | AAAGAAGUUAGUGUACGAA | 319 | AAAGAAGuuAGuGuAcGAATsT | 320 |
| 433-451 | AUUGCACUAUCUUUGCGUA | 321 | AuuGcAcuAucuuuGcGuATsT | 322 |
| 540-558 | GGUAUAAUUCCACGUACCC | 323 | GGuAuAAuuccAcGuAcccTsT | 324 |
| 831-849 | UACUCUAGUCGUUCCCACU | 325 | uAcucuAGucGuucccAcuTsT | 326 |
| 872-890 | UAUGAAAGAAACUACGAUU | 327 | uAuGAAAGAAAcuAcGAuuTsT | 328 |
| 1815-1833 | AUGCUAGAAGUACAUAAGA | 329 | AuGcuAGAAGuAcAuAAGATsT | 330 |
| 1822-1840 | AAGUACAUAAGACCUUAUU | 331 | AAGuAcAuAAGAccuuAuuTsT | 332 |
| 3002-3020 | ACAGCCUGAGCUGUUAAUG | 333 | AcAGccuGAGcuGuuAAuGTsT | 334 |
| 3045-3063 | AAAGAAGAGACAAUUCCGG | 335 | AAAGAAGAGAcAAuuccGGTsT | 336 |
| 3224-3242 | CACACUGGAGAGGUCUAAA | 337 | cAcAcuGGAGAGGucuAAATsT | 338 |
| 3226-3244 | CACUGGAGAGGUCUAAAGU | 339 | cAcuGGAGAGGucuAAAGuTsT | 340 |
| 3227-3245 | ACUGGAGAGGUCUAAAGUG | 341 | AcuGGAGAGGucuAAAGuGTsT | 342 |
| 145-163 | CGUCGCAGCCAAAUUCGUC | 343 | cGucGcAGccAAAuucGucTsT | 344 |
| 1700-1718 | GAAGGCAGUUGACCAACAC | 345 | GAAGGcAGuuGAccAAcAcTsT | 346 |
| 4291-4309 | CAUUCACCCUGACAGAGUU | 347 | cAuucAcccuGAcAGAGuuTsT | 348 |
| 4278-4296 | AAGAGGCCUAACUCAUUCA | 349 | AAGAGGccuAAcucAuucATsT | 350 |
| 3051-3069 | GAGACAAUUCCGGAUGUGG | 351 | GAGAcAAuuccGGAuGuGGTsT | 352 |
| 3058-3076 | UUCCGGAUGUGGAUGUAGA | 353 | uuccGGAuGuGGAuGuAGATsT | 354 |
| 241-259 | AAGCUAGCGCCCAUUCAAU | 355 | AAGcuAGcGcccAuucAAuTsT | 356 |
| 285-303 | GAAGUUAGUGUACGAACUG | 357 | GAAGuuAGuGuAcGAAcuGTsT | 358 |
| 542-560 | UAUAAUUCCACGUACCUU | 359 | uAuAAuuccAcGuAccuuTsT | 360 |
| 2127-2145 | ACAGUGGCCGAUAAGAUAG | 361 | AcAGuGGccGAuAAGAuAGTsT | 362 |
| 3760-3778 | UCUGUCAUCCCUAUAGUUC | 363 | ucuGucAucccuAuAGuucTsT | 364 |
| 3993-4011 | UUCUUGCUAUGACUUGUGU | 365 | uucuuGcuAuGAcuuGuGuTsT | 366 |
| 1696-1714 | GUAAGAAGGCAGUUGACCA | 367 | GuAAGAAGGcAGuuGAccATsT | 368 |
| 2122-2140 | CAUUGACAGUGGCCGAUAA | 369 | cAuuGAcAGuGGccGAuAATsT | 370 |
| 2371-2389 | AGAAACCACUUAGUAGUGU | 371 | AGAAAccAcuuAGuAGuGuTsT | 372 |
| 3143-3161 | GGAUUGUUCAUCAAUUGGC | 373 | GGAuuGuucAucAAuuGGcTsT | 374 |
| 4277-4295 | UAAGAGGCCUAACUCAUUC | 375 | uAAGAGGccuAAcucAuucTsT | 376 |
| 287-305 | AGUUAGUGUACGAACUGGA | 377 | AGuuAGuGuAcGAAcuGGATsT | 378 |
| 1823-1841 | AGUACAUAAGACCUUAUUU | 379 | AGuAcAuAAGAccuuAuuuTsT | 380 |
| 3379-3397 | UGAGCCUUGUGUAUAGAUU | 381 | uGAGccuuGuGuAuAGAuuTsT | 382 |
| 4273-4291 | CCUUUAAGAGGCCUAACUC | 383 | ccuuuAAGAGGccuAAcucTsT | 384 |
| 2375-2393 | ACCACUUAGUAGUGUCCAG | 385 | AccAcuuAGuAGuGuccAGTsT | 386 |
| 4439-4457 | GAAACUUCCAAUUAUGUCU | 387 | GAAAcuuccAAuuAuGucuTsT | 388 |
| 827-845 | UGCAUACUCUAGUCGUUCC | 389 | uGcAuAcucuAGucGuuccTsT | 390 |
| 1699-1717 | AGAAGGCAGUUGACCAACA | 391 | AGAAGGcAGuuGAccAAcATsT | 392 |
| 1824-1842 | GUACAUAAGACCUUAUUUG | 393 | GuAcAuAAGAccuuAuuuGTsT | 394 |
| 429-447 | UAUAAUUGCACUAUCUUUG | 395 | uAuAAuuGcAcuAucuuuGTsT | 396 |
| 856-874 | UCUCUGUUACAAUACAUAU | 397 | ucucuGuuAcAAuAcAuAuTsT | 398 |
| 1194-1212 | UAUGCUCAUAGAGCAAAGA | 399 | uAuGcucAuAGAGcAAAGATsT | 400 |
| 392-410 | UGUUGUUUGUCCAAUUCUG | 401 | uGuuGuuuGuccAAuucuGTsT | 402 |
| 1085-1103 | ACUAACUAGAAUCCUCCAG | 403 | AcuAAcuAGAAuccuccAGTsT | 404 |
| 2069-2087 | UGUGGUGUCUAUACUGAAA | 405 | uGuGGuGucuAuAcuGAAATsT | 406 |
| 4341-4359 | UAUUAUGGGAGACCACCCA | 407 | uAuuAuGGGAGAccAcccATsT | 408 |
| 759-777 | AAGGAUGAAGUCUAUCAAA | 409 | AAGGAuGAAGucuAucAAATsT | 410 |
| 973-991 | UUGAUAAGAGAGCUCGGGA | 411 | uuGAuAAGAGAGcucGGGATsT | 412 |
| 1063-1081 | AUGUUCCUUAUCGAGAAUC | 413 | AuGuuccuuAucGAGAAucTsT | 414 |
| 1190-1208 | GGAAUAUGCUCAUAGAGCA | 415 | GGAAuAuGcucAuAGAGcATsT | 416 |
| 1679-1697 | CCAUUCCAAACUGGAUCGU | 417 | ccAuuccAAAcuGGAucGuTsT | 418 |
| 1703-1721 | GGCAGUUGACCAACACAAU | 419 | GGcAGuuGAccAAcAcAAuTsT | 420 |
| 1814-1832 | CAUGCUAGAAGUACAUAAG | 421 | cAuGcuAGAAGuAcAuAAGTsT | 422 |
| 1818-1836 | CUAGAAGUACAUAAGACCU | 423 | cuAGAAGuAcAuAAGAccuTsT | 424 |
| 1897-1915 | UUGGAUCUCUCACAUCUAU | 425 | uuGGAucucucAcAucuAuTsT | 426 |
| 2066-2084 | AACUGUGGUGUCUAUACUG | 427 | AAcuGuGGuGucuAuAcuGTsT | 428 |
| 2121-2139 | UCAUUGACAGUGGCCGAUA | 429 | ucAuuGAcAGuGGccGAuATsT | 430 |
| 2280-2298 | AUAAAGCAGACCCAUUCCC | 431 | AuAAAGcAGAcccAuucccTsT | 432 |
| 2369-2387 | ACAGAAACCACUUAGUAGG | 433 | AcAGAAAccAcuuAGuAGGTsT | 434 |
| 2372-2390 | GAAACCACUUAGUAGUGUC | 435 | GAAAccAcuuAGuAGuGucTsT | 436 |
| 2409-2427 | AAAUCUAAGGAUAUAGUCA | 437 | AAAucuAAGGAuAuAGucATsT | 438 |
| 2933-2951 | UUAUUUAUACCCAUCAACA | 439 | uuAuuuAuAcccAucAAcATsT | 440 |
| 3211-3229 | ACAGAGGCAUUAACACACU | 441 | AcAGAGGcAuuAAcAcAcuTsT | 442 |
| 3223-3241 | ACACACUGGAGAGGUCUAA | 443 | AcAcAcuGGAGAGGucuAATsT | 444 |
| 3225-3243 | ACACUGGAGAGGUCUAAAG | 445 | AcAcuGGAGAGGucuAAAGTsT | 446 |
| 3291-3309 | CGAGCCCAGAUCAACCUUU | 447 | cGAGcccAGAucAAccuuuTsT | 448 |
| 4036-4054 | UCCCUAUUUCGCUUUCUCC | 449 | ucccuAuuucGcuuucuccTsT | 450 |
| 4180-4198 | UCUAAAAUCACUGUCAACA | 451 | ucuAAAAucAcuGucAAcATsT | 452 |
| 151-169 | AGCCAAAUUCGUCUGCGAA | 453 | AGccAAAuucGucuGcGAATsT | 454 |
| 250-268 | CCCAUUCAAUAGUAGAAUG | 455 | cccAuucAAuAGuAGAAuGTsT | 456 |
| 821-839 | GAUGAAUGCAUACUCUAGU | 457 | GAuGAAuGcAuAcucuAGuTsT | 458 |
| 1060-1078 | CUCAUGUUCCUUAUCGAGA | 459 | cucAuGuuccuuAucGAGATsT | 460 |
| 1075-1093 | GAGAAUCUAAACUAACUAG | 461 | GAGAAucuAAAcuAAcuAGTsT | 462 |
| 1819-1837 | UAGAAGUACAUAAGACCUU | 463 | uAGAAGuAcAuAAGAccuuTsT | 464 |
| 3003-3021 | CAGCCUGAGCUGUUAAUGA | 465 | cAGccuGAGcuGuuAAuGATsT | 466 |
| 3046-3064 | AAGAAGAGACAAUUCCGGA | 467 | AAGAAGAGAcAAuuccGGATsT | 468 |
| 3134-3152 | UGCUGGUGUGGAUUGUUCA | 469 | uGcuGGuGuGGAuuGuucATsT | 470 |
| 155-173 | AAAUUCGUCUGCGAAGAAG | 471 | AAAuucGucuGcGAAGAAGTsT | 472 |
| 4596-4614 | UUUCUGGAAGUUGAGAUGU | 473 | uuucuGGAAGuuGAGAuGuTsT | 474 |
| 365-383 | UACUAAACAGAUUGAUGUU | 475 | uAcuAAAcAGAuuGAuGuuTsT | 476 |
| 374-392 | GAUUGAUGUUUACCGAAGU | 477 | GAuuGAuGuuuAccGAAGuTsT | 478 |
| 436-454 | GCACUAUCUUUGCGUAUGG | 479 | GcAcuAucuuuGcGuAuGGTsT | 480 |
| 539-557 | UGGUAUAAUUCCACGUACC | 481 | uGGuAuAAuuccAcGuAccTsT | 482 |
| 1629-1647 | AGCAAGCUGCUUAACACAG | 483 | AGcAAGcuGcuuAAcAcAGTsT | 484 |
| 2370-2388 | CAGAAACCACUUAGUAGUG | 485 | cAGAAAccAcuuAGuAGuGTsT | 486 |
| 2676-2694 | AACUUAUUGGAGGUUGGAA | 487 | AAcuuAuuGGAGGuuGGAATsT | 488 |
| 3228-3246 | CUGGAGAGGUCUAAAGUGG | 489 | cuGGAGAGGucuAAAGuGGTsT | 490 |
| 3703-3721 | AAAAAAGAUAUAAGGCAGU | 491 | AAAAAAGAuAuAAGGcAGuTsT | 492 |
| 3737-3755 | GAAUUUUGAUAUCUACCCA | 493 | GAAuuuuGAuAucuAcccATsT | 494 |
| 4573-4591 | GUAUUUUUGAUCUGGCAAC | 495 | GuAuuuuuGAucuGGcAAcTsT | 496 |
| 526-544 | AGGAUCCCUUGGCUGGUAU | 497 | AGGAucccuuGGcuGGuAuTsT | 498 |
| 527-545 | GGAUCCCUUGGCUGGUAUA | 499 | GGAucccuuGGcuGGuAuATsT | 500 |
| 256-274 | CAAUAGUAGAAUGUGAUCC | 501 | cAAuAGuAGAAuGuGAuccTsT | 502 |
| 427-445 | GCUAUAAUUGCACUAUCUU | 503 | GcuAuAAuuGcAcuAucuuTsT | 504 |
| 554-572 | UACCCUUCAUCAAAUUUUU | 505 | uAcccuucAucAAAuuuuuTsT | 506 |
| 1210-1228 | AGAACAUAUUGAAUAAGCC | 507 | AGAAcAuAuuGAAuAAGccTsT | 508 |
| 1414-1432 | AAAUUGGUGCUGUUGAGGA | 509 | AAAuuGGuGcuGuuGAGGATsT | 510 |
| 1438-1456 | UGAAUAGGGUUACAGAGUU | 511 | uGAAuAGGGuuAcAGAGuuTsT | 512 |
| 1516-1534 | AAGAACUUGAAACCACUCA | 513 | AAGAAcuuGAAAccAcucATsT | 514 |
| 2279-2297 | AAUAAAGCAGACCCAUUCC | 515 | AAuAAAGcAGAcccAuuccTsT | 516 |
| 2939-2957 | AUACCCAUCAACACUGGUA | 517 | AuAcccAucAAcAcuGGuATsT | 518 |
| 3142-3160 | UGGAUUGUUCAUCAAUUGG | 519 | uGGAuuGuucAucAAuuGGTsT | 520 |
| 3229-3247 | UGGAGAGGUCUAAAGUGGA | 521 | uGGAGAGGucuAAAGuGGATsT | 522 |
| 3763-3781 | GUCUACCCUAUAGUUCACU | 523 | GucuAcccuAuAGuucAcuTsT | 524 |
| 4801-4819 | AUAAUGGCUAUAAUUUCUC | 525 | AuAAuGGcuAuAAuuucucTsT | 526 |
| 529-547 | AUCCCUUGGCUGGUAUAAU | 527 | AucccuuGGcuGGuAuAAuTsT | 528 |
| 425-443 | GCGCUAUAAUUGCACUAUC | 529 | GcGcuAuAAuuGcAcuAucTsT | 530 |
| 1104-1122 | GAUUCUCUGGGAGGGCGUA | 531 | GAuucucuGGGAGGGcGuATsT | 532 |
| 1155-1173 | GCAUCUCUCAAUCUUGAGG | 533 | GcAucucucAAucuuGAGGTsT | 534 |
| 2403-2421 | CAGCAGAAAUCUAAGGAUA | 535 | cAGcAGAAAucuAAGGAuATsT | 536 |
| 3115-3133 | GUCAAGAGCCAUCUGUAGA | 537 | GucAAGAGccAucuGuAGATsT | 538 |
| 3209-3227 | AAACAGAGGCAUUAACACA | 539 | AAAcAGAGGcAuuAAcAcATsT | 540 |
| 3293-3311 | AGCCCAGAUCAACCUUUAA | 541 | AGcccAGAucAAccuuuAATsT | 542 |
| 4574-4592 | UAUUUUUGAUCUGGCAACC | 543 | uAuuuuuGAucuGGcAAccTsT | 544 |
| 352-370 | UGUGUGGAGCAUCUACUAA | 545 | uGuGuGGAGcAucuAcuAATsT | 546 |
| 741-759 | GAAAUUACAGUACACAACA | 547 | GAAAuuAcAGuAcAcAAcATsT | 548 |
| 1478-1496 | ACUUGACCAGUGUAAAUCU | 549 | AcuuGAccAGuGuAAAucuTsT | 550 |
| 1483-1501 | ACCAGUGUAAAUCUGACCU | 551 | AccAGuGuAAAucuGAccuTsT | 552 |
| 1967-1985 | AGAACAAUCAUUAGCAGCA | 553 | AGAAcAAucAuuAGcAGcATsT | 554 |
| 2247-2265 | CAAUGUGGAAACCUAACUG | 555 | cAAuGuGGAAAccuAAcuGTsT | 556 |
| 2500-2518 | ACCAAGAAGGUACAAAAUU | 557 | AccAAGAAGGuAcAAAAuuTsT | 558 |
| 2508-2526 | GGUACAAAAUUGGUUGAAG | 559 | GGuAcAAAAuuGGuuGAAGTsT | 560 |
| 3138-3156 | GGUGUGGAUUGUUCAUCAA | 561 | GGuGuGGAuuGuucAucAATsT | 562 |
| 4304-4322 | AGAGUUCACAAAAAGCCCA | 563 | AGAGuucAcAAAAAGcccATsT | 564 |
| 4711-4729 | UGAUAGCUAAAUUAAACCA | 565 | uGAuAGcuAAAuuAAAccATsT | 566 |
| 1221-1239 | AAUAAGCCUGAAGUGAAUC | 567 | AAuAAGccuGAAGuGAAucTsT | 568 |
| 1705-1723 | CAGUUGACCAACACAAUGC | 569 | cAGuuGAccAAcAcAAuGcTsT | 570 |
| 3137-3155 | UGGUGUGGAUUGUUCAUCA | 571 | uGGuGuGGAuuGuucAucATsT | 572 |
| 4292-4310 | AUUCACCCUGACAGAGUUC | 573 | AuucAcccuGAcAGAGuucTsT | 574 |
| 1829-1847 | UAAGACCUUAUUUGGUAAU | 575 | uAAGAccuuAuuuGGuAAuTsT | 576 |
| 2244-2262 | AAGCAAUGUGGAAACCUAA | 577 | AAGcAAuGuGGAAAccuAATsT | 578 |
| 2888-2906 | UCUGAAACUGGAUAUCCCA | 579 | ucuGAAAcuGGAuAucccATsT | 580 |

[0272] TABLE 3

| | | 1st | | 2nd | | | |
|---|---|---|---|---|---|---|---|
| | | single | | single | | | |
| | | dose | | dose | | 3rd | SDs 3rd |
| | | screen @ | SDs 1st | screen @ | SDs 2nd | single | screen |
| | | 50 nM [% | screen | 25 nM [% | screen | dose | (among |
| antisense | duplex | resudual | (among | resudual | (among | screen | quadrup- |
| sequence (5′-3′) | name | mRNA] | quadruplicates) | mRNA] | quadruplicates) | @25 nM | licates) |
| UGGGAACGACuAGAGuAUGTsT | AD-12072 | 65% | 2% | 82% | 5% | | |
| CuACuAUUGAAUGGGCGCUTsT | AD-12073 | 84% | 1% | 61% | 6% | | |
| GAAUGGGCGCuAGCUUUCCTsT | AD-12074 | 51% | 3% | 36% | 9% | | |
| UGAAUGGGCGCuAGCUUUCTsT | AD-12075 | 56% | 4% | 36% | 4% | | |
| UCcAUcAAUCGuAGUUUCUTsT | AD-12076 | 21% | 4% | 13% | 3% | | |
| AGAUUCUCGAuAAGGAAcATsT | AD-12077 | 11% | 2% | 6% | 1% | | |
| GGCUCGcAGAGGuAAUCUGTsT | AD-12078 | 22% | 3% | 9% | 2% | | |
| UCuACuAUUGAAUGGGCGCTsT | AD-12079 | 22% | 10% | 15% | 7% | | |
| AuACGcAAAGAuAGUGcAATsT | AD-12080 | 68% | 4% | 52% | 13% | | |
| GCGCuAGCUUUCCGCUCUGTsT | AD-12081 | 34% | 8% | 35% | 24% | | |
| AGAUuACcAAAuAAGGUCUTsT | AD-12082 | 20% | 2% | 92% | 5% | | |
| GuACGCCCUCcAAGAGAAUTsT | AD-12083 | 85% | 6% | 63% | 10% | | |
| ACGUGGAAUuAuACcAGCCTsT | AD-12084 | 18% | 6% | 17% | 4% | | |
| AUGGGCGCuAGCUUUCCGCTsT | AD-12085 | 13% | 4% | 12% | 4% | | |
| cAuACGcAAAGAuAGUGcATsT | AD-12086 | 26% | 5% | 17% | 3% | | |
| AGGGuACGUGGAAUuAuACTsT | AD-12087 | 95% | 4% | 80% | 4% | | |
| UCuAGUuAGUUuAGAUUCUTsT | AD-12088 | 29% | 6% | 29% | 2% | | |
| GuAACCCuAUUcAGCUCCUTsT | AD-12089 | 69% | 5% | 64% | 7% | | |
| AuAAGGUCGuAUGuACUUCTsT | AD-12090 | 46% | 15% | 34% | 5% | | |
| uAUCUuAUCGGCcACUGUCTsT | AD-12091 | 16% | 6% | 17% | 3% | | |
| GGAcACuACuAAGUGGUUUTsT | AD-12092 | 82% | 26% | 63% | 5% | | |
| AAAuAGGGAAGUCuAGGGATsT | AD-12093 | 84% | 4% | 70% | 4% | | |
| AGCGAAAuAGGGAAGUCuATsT | AD-12094 | 46% | 3% | 34% | 3% | | |
| ACGAAUUUGGCUGCGACGCTsT | AD-12095 | 14% | 2% | 13% | 1% | | |
| uAUUGAAUGGGCGCuAGCUTsT | AD-12096 | 26% | 11% | 17% | 1% | | |
| CUCcAUcAAUCGuAGUUUCTsT | AD-12097 | 23% | 2% | 21% | 1% | | |
| UGAUCUUCuAUCUuAUCGGTsT | AD-12098 | 41% | 14% | 17% | 3% | | |
| uACuAUUGAAUGGGCGCuATsT | AD-12099 | 57% | 2% | 48% | 6% | | |
| cAGUUUGGCcAuACGcAAATsT | AD-12100 | 101% | 11% | 98% | 8% | | |
| AUUUGAUGAAGGGuACGUGTsT | AD-12101 | 46% | 7% | 32% | 2% | | |
| GUUUGGCcAuACGcAAAGATsT | AD-12102 | 96% | 17% | 88% | 18% | | |
| UGGAcAAAcAAcACUUCGGTsT | AD-12103 | 19% | 5% | 20% | 2% | | |
| GGCGCuAGCUUUCCGCUCUTsT | AD-12104 | 40% | 8% | 24% | 2% | | |
| CuAUUGAAUGGGCGCuAGCTsT | AD-12105 | 39% | 2% | 35% | 10% | | |
| CcAGUUCGuAcACuAACUUTsT | AD-12106 | 87% | 6% | 79% | 19% | | |
| CcAAUCCUCcAGUUCGuACTsT | AD-12107 | 29% | 2% | 32% | 16% | | |
| AGCcAAUCCUCcAGUUCGUTsT | AD-12108 | 38% | 4% | 39% | 8% | | |
| CUUCGGuAAAcAUcAAUCUTsT | AD-12109 | 49% | 3% | 44% | 10% | | |
| AGUGcAAUuAuAGCCcAuATsT | AD-12110 | 85% | 5% | 80% | 14% | | |
| UUUGGCcAuACGcAAAGAUTsT | AD-12111 | 64% | 6% | 71% | 18% | | |
| GAGUGGGAACGACuAGAGUTsT | AD-12112 | 48% | 4% | 41% | 5% | | |
| UUCUCcAUcAAUCGuAGUUTsT | AD-12113 | 13% | 0% | 14% | 3% | | |
| CUUCCCGAGCUCUCUuAUCTsT | AD-12114 | 32% | 6% | 16% | 4% | | |
| AGUuAGUUuAGAUUCUCGATsT | AD-12115 | 8% | 4% | 7% | 5% | | |
| UGGAGGAUUCuAGUuAGUUTsT | AD-12116 | 74% | 5% | 61% | 7% | | |
| AACUGCCUUCUuACGAUCCTsT | AD-12117 | 21% | 4% | 20% | 2% | | |
| UcAACUGCCUUCUuACGAUTsT | AD-12118 | 44% | 4% | 42% | 6% | | |
| UUGUGUUGGUcAACUGCCUTsT | AD-12119 | 37% | 4% | 24% | 3% | | |
| UCUUCuAUCUuAUCGGCcATsT | AD-12120 | 22% | 2% | 15% | 4% | | |
| UGUUGACuAuAUCCUuAGATsT | AD-12121 | 32% | 1% | 22% | 2% | | |
| GAAAGcAAUuAAGCUuAGUTsT | AD-12122 | 36% | 16% | 10% | 5% | | |
| AUuAAAGGUUGAUCUGGGCTsT | AD-12123 | 28% | 1% | 16% | | | |
| UUCCGCUCUGCcAAAUuAATsT | AD-12124 | 28% | 2% | 16% | | | |
| uAGUUuAGAUUCUCGAuAATsT | AD-12125 | 15% | 1% | 14% | | | |
| ACuAUUGAAUGGGCGCuAGTsT | AD-12126 | 51% | 22% | 27% | | | |
| AGGAUcAcAUUCuACuAUUTsT | AD-12127 | 54% | 4% | 42% | 9% | | |
| AcACuAACUUCUUUUCGuATsT | AD-12128 | 29% | 1% | 20% | 2% | | |
| AGUUCGuAcACuAACUUCUTsT | AD-12129 | 22% | 3% | 19% | 3% | | |
| AAAcAUcAAUCUGUUuAGUTsT | AD-12130 | 53% | 6% | 42% | 7% | | |
| AGUUUGGCcAuACGcAAAGTsT | AD-12131 | 28% | 5% | 22% | 3% | | |
| CCcAGGuAuACUCUUcAUUTsT | AD-12132 | 88% | 2% | 90% | 18% | | |
| GAAGGGuACGUGGAAUuAUTsT | AD-12133 | 34% | 2% | 26% | 6% | | |
| AAUUUGAUGAAGGGuACGUTsT | AD-12134 | 18% | 3% | 14% | 2% | | |
| AAAUUUGAUGAAGGGuACGTsT | AD-12135 | 50% | 6% | 37% | 4% | | |
| AAAAUUUGAUGAAGGGuACTsT | AD-12136 | 42% | 19% | 22% | 2% | | |
| GuACcAUuAUcAGuAAGUUTsT | AD-12137 | 85% | 12% | 92% | 4% | | |
| cAGAGAcACUUUGACUGAATsT | AD-12138 | 47% | 6% | 49% | 1% | | |
| UcAGAUCAUGGAUuAAGAATsT | AD-12139 | 80% | 5% | 72% | 4% | | |
| cAUCCUUGUUGUGuACUGUTsT | AD-12140 | 97% | 22% | 67% | 9% | | |
| CcAUcAAUCGuAGUUUCUUTsT | AD-12141 | 120% | 4% | 107% | 10% | | |
| UCUCcAUcAAUCGuAGUUUTsT | AD-12142 | 55% | 8% | 33% | 4% | | |
| UCUCUuAUcAAcAGCUCcATsT | AD-12143 | 64% | 34% | 19% | 2% | | |
| CCUGGAGGAUUCuAGUuAGTsT | AD-12144 | 58% | 29% | 17% | 2% | | |
| UUGCUCuAUGAGcAuAUUCTsT | AD-12145 | 27% | 8% | 18% | 2% | | |
| UUCUUUGCUCuAUGAGcAUTsT | AD-12146 | 19% | 20% | 15% | 1% | | |
| CUcAAcAGcACcAAUUUUUTsT | AD-12147 | 29% | 9% | 35% | 3% | | |
| uAACCCuAUUcAGCUCCUCTsT | AD-12148 | 30% | 3% | 56% | 5% | | |
| UGuAACCCuAUUcAGCUCCTsT | AD-12149 | 8% | 2% | 12% | 3% | | |
| CUGuAACCCuAUUcAGCUCTsT | AD-12150 | 31% | 2% | 31% | 7% | | |
| UCUGuAACCCuAUUcAGCUTsT | AD-12151 | 9% | 5% | 14% | 2% | | |
| CUCUGuAACCCuAUUcAGCTsT | AD-12152 | 3% | 3% | 23% | 3% | | |
| UUCUuACGAUCcAGUUUGGTsT | AD-12153 | 20% | 6% | 34% | 4% | | |
| cAACUGCCUUCUuACGAUCTsT | AD-12154 | 24% | 7% | 44% | 3% | | |
| GcAGAUuACcAAAuAAGGUTsT | AD-12155 | 33% | 6% | 53% | 11% | | |
| CUGuAGuAAUGGuAUCuAATsT | AD-12156 | 35% | 5% | 40% | 5% | | |
| GCuACUGuAGuAAUGGuAUTsT | AD-12157 | 8% | 3% | 23% | 4% | | |
| UCcAAGUGCuACUGuAGuATsT | AD-12158 | 13% | 2% | 22% | 5% | | |
| UGuAGuAcAGUUUuACUUUTsT | AD-12159 | 34% | 6% | 46% | 5% | | |
| UuAGAAGAUcAGUCUUGAGTsT | AD-12160 | 19% | 3% | 31% | 4% | | |
| UCUuAUCGGCcACUGUcAATsT | AD-12161 | 88% | 4% | 83% | 7% | | |
| AUCUuAUCGGCcACUGUcATsT | AD-12162 | 26% | 7% | 32% | 7% | | |
| AGUuAGGUUUCcAcAUUGCTsT | AD-12163 | 55% | 9% | 40% | 3% | | |
| CCUGGAcACuACuAAGUGGTsT | AD-12164 | | | 21% | 3% | | |
| AACcAAUUUUGuACCUUCUTsT | AD-12165 | 30% | 3% | 41% | 4% | | |
| AUuAAGCUuAGUcAAACcATsT | AD-12166 | 9% | 10% | 22% | 9% | | |
| AAUuAAGCUuAGUcAAACCTsT | AD-12167 | 26% | 3% | 30% | 2% | | |
| AGAUGGCUCUUGACUuAGATsT | AD-12168 | 54% | 4% | 59% | 20% | | |
| AAGUGAACuAuAGGGAUGATsT | AD-12169 | 41% | 4% | 51% | 16% | | |
| AAAGUGAACuAuAGGGAUGTsT | AD-12170 | 43% | 4% | 52% | 20% | | |
| GAAAuAGGGAAGUCuAGGGTsT | AD-12171 | 67% | 3% | 73% | 25% | | |
| AAGCGAAAuAGGGAAGUCUTsT | AD-12172 | 53% | 15% | 37% | 2% | | |
| UCuAcAAAUGGUUUGGUGATsT | AD-12173 | 39% | 0% | 39% | 0% | | |
| AGUuAGGCCUCUuAAAGGATsT | AD-12174 | 41% | 5% | 27% | 0% | | |
| AUGAGUuAGGCCUCUuAAATsT | AD-12175 | 29% | 0% | 38% | 14% | | |
| AAUGAGUuAGGCCUCUuAATsT | AD-12176 | 43% | 2% | 56% | 25% | | |
| AGGGUGAAUGAGUuAGGCCTsT | AD-12177 | 68% | 6% | 74% | 30% | | |
| UGCcAGAUcAAAAAuACcATsT | AD-12178 | 41% | 4% | 41% | 6% | | |
| AAACUUuAcAcACuAAACUTsT | AD-12179 | 53% | 5% | 44% | 5% | | |
| CUUCGcAGACGAAUUUGGCTsT | AD-12180 | 16% | 2% | 13% | 4% | | |
| UCUUCUUCGcAGACGAAUUTsT | AD-12181 | 19% | 3% | 14% | 2% | | |
| UUcAUuAGGUGACCUUUcATsT | AD-12182 | 16% | 4% | 18% | 8% | | |
| UGCcAAAUuAAAUGGUCUGTsT | AD-12183 | 26% | 3% | 19% | 4% | | |
| CUGCcAAAUuAAAUGGUCUTsT | AD-12184 | 54% | 2% | 77% | 8% | | |
| AUuAuAGCCcAuAAuAACUTsT | AD-12185 | 8% | 1% | 9% | 1% | | |
| uACGUGGAAUuAuACcAGCTsT | AD-12186 | 35% | 3% | 41% | 6% | | |
| CCGCUCUGCcAAAUuAAAUTsT | AD-12187 | 34% | 17% | 27% | 1% | | |
| UCCGCUCUGCcAAAUuAAATsT | AD-12188 | 30% | 3% | 27% | 4% | | |
| AGCUUUCCGCUCUGCcAAATsT | AD-12189 | 51% | 4% | 48% | 5% | | |
| UUcACCUUCcAUUGuAAAATsT | AD-12190 | 33% | 2% | 26% | 4% | | |
| UGACCUUUcACCUUCcAUUTsT | AD-12191 | 20% | 2% | 13% | 0% | | |
| UuAAAUGGUCUGcAUCUcATsT | AD-12192 | 21% | 1% | 23% | 10% | | |
| cAGACGAAUUUGGCUGCGATsT | AD-12193 | 64% | 8% | 98% | 6% | | |
| AGAuAGUGcAAUuAuAGCCTsT | AD-12194 | 8% | 2% | 15% | 4% | | |
| CUuAUCGGCcACUGUcAAUTsT | AD-12195 | 34% | 2% | 48% | 3% | | |
| GCGAAAuAGGGAAGUCuAGTsT | AD-12196 | 34% | 2% | 51% | 3% | | |
| GGCcAuACGcAAAGAuAGUTsT | AD-12197 | 75% | 4% | 93% | 6% | | |
| GUGGGAACGACuAGAGuAUTsT | AD-12198 | 55% | 5% | 48% | 2% | | |
| cAUcAAUCGuAGGUUCUUUTsT | AD-12199 | 102% | 6% | 118% | 9% | | |
| CCCGCcAAAAAAUcAAGGCTsT | AD-12200 | 75% | 6% | 60% | 12% | | |
| UUCuACuAUUGAAUGGGCGTsT | AD-12201 | 42% | 3% | 16% | 4% | | |
| AGcAGAUuACcAAAuAAGGTsT | AD-12202 | 29% | 4% | 9% | 3% | | |
| cAcAUCCGGAAUUGUCUCUTsT | AD-12203 | 114% | 14% | 89% | 20% | | |
| AAUUuAGCuAUcAAAGUcATsT | AD-12204 | 64% | 7% | 26% | 5% | | |
| CuAGCUUUCCGCUCUGCcATsT | AD-12205 | 66% | 12% | 35% | 4% | | |
| GGGCGCuAGCUUUCCGCUCTsT | AD-12206 | 46% | 3% | 32% | 12% | | |
| UUCGuAcACuAACUUCUUUTsT | AD-12207 | 57% | 5% | 40% | 6% | | |
| uACGcAAAGAuAGUGcAAUTsT | AD-12208 | 30% | 8% | 10% | 5% | | |
| GGGuACGUGGAAUuAuACCTsT | AD-12209 | 101% | 6% | 102% | 23% | | |
| AGUGGGAACGACuAGAGuATsT | AD-12210 | 38% | 11% | 27% | 14% | | |
| AAUCGuAGUUUCGUGcAuATST | AD-12211 | 16% | 6% | 10% | 5% | | |
| UCUuAUGuACUUCuAGcAUTsT | AD-12212 | 59% | 8% | 65% | 5% | | |
| AAuAAGGUCUuAUGuACUUTsT | AD-12213 | 24% | 9% | 12% | 2% | | |
| cAUuAAcAGCUcAGGCUCUTsT | AD-12214 | 67% | 14% | 70% | 12% | | |
| CCGGAAUUGUCUCUUCUUGTsT | AD-12215 | 29% | 13% | 13% | 4% | | |
| UUuAGACCUCUCcAGUGUGTsT | AD-12216 | 36% | 4% | 13% | 1% | | |
| ACUUuAGACCUCUCcAGUGTsT | AD-12217 | 36% | 9% | 11% | 2% | | |
| cACUUuAGACCUCUCcAGUTsT | AD-12218 | 35% | 5% | 17% | 3% | | |
| GACGAAUGUGGCUGCGACGTsT | AD-12219 | 41% | 9% | 14% | 1% | | |
| GUGUUGGUcAACUGCCUUCTsT | AD-12220 | 37% | 5% | 23% | 3% | | |
| AAGUCUGUcAGGGUGAAUGTsT | AD-12221 | 58% | 7% | 39% | 6% | | |
| UGAAUGAGUuAGGCCUCUUTsT | AD-12222 | 74% | 9% | 53% | 3% | | |
| CcAcAUCCGGAAUUGUCUCTsT | AD-12223 | 74% | 10% | 67% | 7% | | |
| UCuAcAUCcAcAUCCGGAATsT | AD-12224 | 24% | 2% | 11% | 2% | | |
| AUUGAAUGGGCGCuAGCUUTsT | AD-12225 | 75% | 5% | 76% | 14% | | |
| cAGUUCGuAcACuAACUUCTsT | AD-12226 | 45% | 8% | 40% | 3% | | |
| AAGGGuACGUGGAAUuAuATsT | AD-12227 | 61% | 6% | 47% | 5% | | |
| CuAUCUuAUCGGCcACUGUTsT | AD-12228 | 28% | 3% | 25% | 5% | | |
| GAACuAuAGGGAUGAcAGATsT | AD-12229 | 54% | 13% | 37% | 6% | | |
| AcAcAAGUcAuAGcAAGAATsT | AD-12230 | 70% | 17% | 65% | 4% | | |
| UGGUcAACUGCCUUCUuACTsT | AD-12231 | 32% | 12% | 22% | 6% | | |
| UuAUCGGCcACUGUcAAUGTsT | AD-12232 | 30% | 3% | 17% | 2% | | |
| AcACuACuAAGUGGUUUCUTsT | AD-12233 | 38% | 2% | 32% | 3% | | |
| GCcAAUUGAUGAAcAAUCCTsT | AD-12234 | 90% | 5% | 95% | 7% | | |
| GAAUGAGUuAGGCCUCUuATsT | AD-12235 | 57% | 7% | 46% | 3% | | |
| UCcAGUUCGuAcACuAACUTsT | AD-12236 | 34% | 8% | 16% | 2% | | |
| AAAuAAGGUCUuAUGuACUTsT | AD-12237 | 42% | 9% | 32% | 8% | | |
| AAUCuAuAcAcAAGGCUcATsT | AD-12238 | 42% | 6% | 34% | 6% | | |
| GAGUuAGGCCUCUuAAAGGTsT | AD-12239 | 42% | 3% | 40% | 4% | | |
| CUGGAcACuACuAAGUGGUTsT | AD-12240 | 47% | 6% | 36% | 5% | | |
| AGAcAuAAUUGGAAGUUUCTsT | AD-12241 | 69% | 5% | 70% | 8% | | |
| GGAACGACuAGAGuAUGcATsT | AD-12242 | 61% | 2% | 47% | 3% | | |
| UGUUGGUcAACUGCCUUCUTsT | AD-12243 | 26% | 7% | 15% | 1% | | |
| cAAAuAAGGUCUuAUGuACTsT | AD-12244 | 25% | 6% | 15% | 1% | | |
| cAAAGAuAGUGcAAUuAuATsT | AD-12245 | 65% | 6% | 83% | 13% | | |
| AuAUGuAUUGuAAcAGAGATsT | AD-12246 | 29% | 7% | 31% | 6% | | |
| UCUUUGCUCuAUGAGcAuATsT | AD-12247 | 57% | 13% | 50% | 3% | | |
| cAGAAUUGGAcAAAcAAcATsT | AD-12248 | 36% | 8% | 20% | 3% | 15% | 7% |
| CUGGAGGAUUCuAGUuAGUTsT | AD-12249 | 44% | 3% | 70% | 11% | 103% | 34% |
| UUUcAGuAuAGAcACcAcATsT | AD-12250 | 47% | 5% | 18% | 5% | 17% | 4% |
| UGGGUGGUCUCCcAuAAuATsT | AD-12251 | 121% | 28% | 35% | 8% | 60% | 42% |
| UUUGAuAGACUUcAUCCUUTsT | AD-12252 | 94% | 15% | 8% | 3% | 5% | 3% |
| UCCCGAGCUCUCUuAUcAATsT | AD-12253 | 94% | 33% | 42% | 8% | 49% | 27% |
| GAUUCUCGAuAAGGAAcAUTsT | AD-12254 | 101% | 58% | 70% | 5% | 80% | 32% |
| UGCUCuAUGAGcAuAUUCCTsT | AD-12255 | 163% | 37% | 38% | 6% | 36% | 10% |
| ACGAUCcAGUUUGGAAUGGTsT | AD-12256 | 112% | 62% | 18% | 3% | 9% | 4% |
| AUUGUGUUGGUcAACUGCCTsT | AD-12257 | 10% | 4% | 9% | 2% | 6% | 2% |
| CUuAUGuACUUCuAGcAUGTsT | AD-12258 | 27% | 9% | 18% | 3% | 20% | 6% |
| AGGUCUuAUGuACUUCuAGTsT | AD-12259 | 20% | 5% | 12% | 2% | 13% | 5% |
| AuAGAUGUGAGAGAUCcAATsT | AD-12260 | 22% | 7% | 81% | 7% | 65% | 13% |
| cAGuAuAGAcACcAcAGUUTsT | AD-12261 | 122% | 11% | 66% | 7% | 80% | 22% |
| uAUCGGCcACUGUcAAUGATsT | AD-12262 | 57% | 30% | 33% | 6% | 44% | 18% |
| GGGAAUGGGUCUGCUUuAUTsT | AD-12263 | 177% | 57% | 85% | 11% | 84% | 15% |
| ACuACuAAGUGGUUUCUGUTsT | AD-12264 | 37% | 6% | 10% | 1% | 10% | 4% |
| GAcACuACuAAGUGGUUUCTsT | AD-12265 | 40% | 8% | 17% | 1% | 20% | 10% |
| UGACuAuAUCCUuAGAUUUTsT | AD-12266 | 33% | 9% | 9% | 1% | 8% | 4% |
| UGUUGAUGGGuAuAAAuAATsT | AD-12267 | 34% | 13% | 11% | 1% | 6% | 2% |
| AGUGUGUuAAUGCCUCUGUTsT | AD-12268 | 34% | 6% | 11% | 1% | 9% | 2% |
| UuAGACCUCUCcAGUGUGUTsT | AD-12269 | 54% | 6% | 33% | 4% | 29% | 7% |
| CUUuAGACCUCUCcAGUGUTsT | AD-12270 | 52% | 5% | 29% | 4% | 27% | 6% |
| AAAGGUUGAUCUGGGCUCGTsT | AD-12271 | 53% | 7% | 27% | 3% | 19% | 6% |
| GGAGAAAGCGAAAuAGGGATsT | AD-12272 | 85% | 15% | 57% | 7% | 51% | 16% |
| UGUUGAcAGUGAUUUuAGATsT | AD-12273 | 36% | 6% | 26% | 2% | 30% | 5% |
| UUCGcAGACGAAUUUGGCUTsT | AD-12274 | 75% | 21% | 40% | 2% | 50% | 19% |
| cAUUCuACuAUUGAAUGGGTsT | AD-12275 | 29% | 9% | 8% | 1% | 8% | 4% |
| ACuAGAGuAUGcAUUcAUCTsT | AD-12276 | 45% | 19% | 15% | 2% | 16% | 12% |
| UCUCGAuAAGGAAcAUGAGTsT | AD-12277 | 58% | 17% | 32% | 2% | 55% | 14% |
| CuAGUuAGUUuAGAUUCUCTsT | AD-12278 | 120% | 35% | 96% | 10% | 124% | 38% |
| AAGGUCUuAUGuACUUCuATsT | AD-12279 | 47% | 29% | 17% | 1% | 12% | 4% |
| UcAUuAAcAGCUcAGGCUGTsT | AD-12280 | 2% | 0% | 3% | 1% | | |
| UCCGGAAUUGUCUCUUCUUTsT | AD-12281 | 2% | 0% | 5% | 2% | | |
| UGAAcAAUCcAcACcAGcATsT | AD-12282 | 3% | 0% | 25% | 5% | | |
| CUUCUUCGcAGACGAAUUUTsT | AD-12283 | 3% | 1% | 35% | 4% | | |
| AcAUCUcAACUUCcAGAAATsT | AD-12284 | 5% | 2% | 49% | 8% | | |
| AAcAUcAAUCUGUUuAGuATsT | AD-12285 | 7% | 7% | 21% | 26% | | |
| ACUUCGGuAAAcAUcAAUCTsT | AD-12286 | 28% | 34% | 12% | 7% | | |
| CcAuACGcAAAGAuAGUGCTsT | AD-12287 | 40% | 21% | 51% | 23% | | |
| GGuACGUGGAAUuAuACcATsT | AD-12288 | 26% | 7% | 155% | 146% | | |
| CUGUGUuAAGcAGCUUGCUTsT | AD-12289 | 43% | 21% | 220% | 131% | | |
| cACuACuAAGUGGUUUCUGTsT | AD-12290 | 2% | 1% | 81% | 23% | | |
| UuAcAACCUCcAAuAAGUUTsT | AD-12291 | 4% | 1% | 70% | 3% | | |
| CcACUUuAGACCUCUCcAGTsT | AD-12292 | 2% | 3% | 6% | 2% | | |
| ACUGCCUuAuAUCUUUUUUTsT | AD-12293 | 4% | 2% | 36% | 3% | | |
| UGGGuAGAuAUcAAAAUUCTsT | AD-12294 | 10% | 6% | 38% | 3% | | |
| GUUGCcAGAUcAAAAAuACTsT | AD-12295 | 29% | 31% | 37% | 3% | | |
| AuACcAGCcAAGGGAUCCUTsT | AD-12296 | 82% | 4% | 89% | 2% | | |
| uAuACcAGCcAAGGGAUCCTsT | AD-12297 | 75% | 3% | 65% | 2% | | |
| GGAUcAcAUUCuACuAUUGTsT | AD-12298 | 73 | 4% | 60% | 3% | | |
| AAGAuAGUGcAAUuAuAGCTsT | AD-12299 | 76% | 4% | 65% | 4% | | |
| AAAAAUUUGAUGAAGGGuATsT | AD-12300 | 36% | 4% | 15% | 1% | | |
| GGCUuAUUcAAuAUGUUCUTsT | AD-12301 | 33% | 4% | 18% | 2% | | |
| UCCUcAAcAGcACcAAUUUTsT | AD-12302 | 66% | 5% | 65% | 3% | | |
| AACUCUGuAACCCuAUUcATsT | AD-12303 | 35% | 6% | 17% | 2% | | |
| UGAGUGGUUUcAAGUUCUUTsT | AD-12304 | 70% | 8% | 70% | 6% | | |
| GGAAUGGGUCUGCUUuAUUTsT | AD-12305 | 63% | 8% | 80% | 7% | | |
| uACcAGUGUUGAUGGGuAUTsT | AD-12306 | 23% | 6% | 20% | 3% | | |
| CcAAUUGAUGAAcAAUCcATsT | AD-12307 | 78% | 10% | 58% | 5% | | |
| UCcACUUuAGACCUCUCcATsT | AD-12308 | 27% | 8% | 15% | 2% | | |
| AGUGAACuAuAGGGAUGACTsT | AD-12309 | 58% | 11% | 42% | 3% | | |
| GAGAAAUuAuAGCcAUuAUTsT | AD-12310 | 106% | 23% | 80% | 2% | | |
| AUuAuACcAGCcAAGGGAUTsT | AD-12311 | 73% | 12% | 60% | 2% | | |
| GAuAGUGcAAUuAuAGCCCTsT | AD-12312 | 39% | 3% | 36% | 3% | | |
| uACGCCCUCcAAGAGAAUCTsT | AD-12313 | 64% | 9% | 49% | 6% | | |
| CCUcAAGAUUGAGAGAUGCTsT | AD-12314 | 28% | 7% | 14% | 6% | | |
| uAUCCUuAGAUUUCUGCUGTsT | AD-12315 | 31% | 7% | 13% | 2% | | |
| UCuAcAGAUGGCUCUUGACTsT | AD-12316 | 42% | 5% | 14% | 2% | | |
| UGUGUuAAUGCCUCUGUUUTsT | AD-12317 | 34% | 9% | 15% | 5% | | |
| UuAAAGGUUGAUCUGGGCUTsT | AD-12318 | 46% | 4% | 28% | 4% | | |
| GGUUGCcAGAUcAAAAAuATST | AD-12319 | 77% | 3% | 56% | 4% | | |
| UuAGuAGAUGCUCcAAAcATsT | AD-12320 | 55% | 7% | 41% | 3% | | |
| UGUUGUGuACUGuAAUUUCTsT | AD-12321 | 21% | 3% | 10% | 2% | | |
| AGAUUuAcACUGGUcAAGUTsT | AD-12322 | 27% | 8% | 30% | 12% | | |
| AGGUcAGAUUuAcACUGGUTsT | AD-12323 | 26% | 7% | 35% | 18% | | |
| UGCUGCuAAUGAUUGUUCUTsT | AD-12324 | 27% | 8% | 27% | 14% | | |
| cAGUuAGGUUUCcAcAUUGTsT | AD-12325 | 32% | 12% | 32% | 22% | | |
| AAUUUUGuACCUUCUUGGUTsT | AD-12326 | 42% | 22% | 45% | 41% | | |
| CUUcAACcAAUUUUGuACCTsT | AD-12327 | 36% | 14% | 37% | 32% | | |
| UUGAUGAAcAAUCcAcACCTsT | AD-12328 | 45% | 2% | 31% | 3% | | |
| UGGGCUUUUUGUGAACUCUTsT | AD-12329 | 61% | 4% | 34% | 3% | | |
| UGGUUuAAUUuAGCuAUcATsT | AD-12330 | 63% | 5% | 38% | 4% | | |
| GAUUcACUUcAGGCUuAUUTsT | AD-12331 | 50% | 2% | 26% | 5% | | |
| GcAUUGUGUUGGUcAACUGTsT | AD-12332 | 80% | 4% | 51% | 7% | | |
| UGAUGAAcAAUCcAcACcATsT | AD-12333 | 34% | 6% | 12% | 2% | | |
| GAACUCUGUcAGGGUGAAUTsT | AD-12334 | 27% | 2% | 18% | 3% | | |
| AUuACcAAAuAAGGUCUuATsT | AD-12335 | 84% | 6% | 60% | 7% | | |
| UuAGGUUUCcAcAUUGCUUTsT | AD-12336 | 45% | 4% | 36% | 4% | | |
| UGGGAuAUCcAGUUUcAGATsT | AD-12337 | 30% | 7% | 19% | 2% | | |

| | | | | | single | |
|---|---|---|---|---|---|---|
| | | | | | dose | |
| | | | | | screen @ | |
| | | | | | 25 nM [% | SDs 2nd |
| | | | | duplex | residual | screen (among |
| sequence (5′-3′) | seqID | sequence (5′-3′) | seqID | name | mRNA] | quadruplicates) |
| ccAuuAcuAcAGuAGcAcuTsT | 582 | AGUGCuACUGuAGuAAUGGTsT | 583 | AD-14085 | 19% | 1% |
| AucuGGcAAccAuAuuucuTsT | 584 | AGAAAuAUGGUUGCcAGAUTsT | 585 | AD-14086 | 38% | 1% |
| GAuAGcuAAAuuAAAccAATsT | 586 | UUGGUUuAAUUuAGCuAUCTsT | 587 | AD-14087 | 75% | 10% |
| AGAuAccAuuAcuAcAGuATsT | 588 | uACUGuAGuAAUGGuAUCUTsT | 589 | AD-14088 | 22% | 8% |
| GAuuGuucAucAAuuGGcGTsT | 590 | CGCcAAUUGAUGAAcAAUCTsT | 591 | AD-14089 | 70% | 12% |
| GcuuucuccucGGcucAcuTsT | 592 | AGuGAGCCGAGGAGAAAGCTsT | 593 | AD-14090 | 79% | 11% |
| GGAGGAuuGGcuGAcAAGATsT | 594 | UCUUGUcAGCcAAUCCUCCTsT | 595 | AD-14091 | 29% | 3% |
| uAAuGAAGAGuAuAccuGGTsT | 596 | CcAGGuAuACUCUUcAUuATsT | 597 | AD-14092 | 23 | 2% |
| uuucAccAAAccAuuuGuATsT | 598 | uAcAAAUGGUUUGGUGAAATsT | 599 | AD-14093 | 60% | 2% |
| cuuAuuAAGGAGuAuAcGGTsT | 600 | CCGuAuACUCCUuAAuAAGTsT | 601 | AD-14094 | 11% | 3% |
| GAAucAGAuGGAcGuAAGTsT | 602 | CUuACGUCcAUCUGAUUUCTsT | 603 | AD-14095 | 10% | 2% |
| cAGAuGucAGcAuAAGcGATsT | 604 | UCGCUuAUGCUGAcAUCUGTsT | 605 | AD-14096 | 27% | 2% |
| AucuAAcccuAGuuGuAucTsT | 606 | GAuAcAACuAGGGUuAGAUTsT | 607 | AD-14097 | 45% | 6% |
| AAGAGcuuGuuAAAAucGGTsT | 608 | CCGAUUUuAAcAAGCUCUUTsT | 609 | AD-14098 | 50% | 10% |
| uuAAGGAGuAuAcGGAGGATsT | 610 | UCCUCCGuAuACUCCUuAATsT | 611 | AD-14099 | 12% | 4% |
| uuGcAAuGuAAAuAcGuAuTsT | 612 | AuACGuAUUuAcAUUGcAATsT | 613 | AD-14100 | 49% | 7% |
| ucuAAcccuAGuuGuAuccTsT | 614 | GGAuAcAACuAGGGUuAGATsT | 615 | AD-14101 | 35% | 1% |
| cAuGuAucuuuuucucGAuTsT | 616 | AUCGAGAAAAAGAuAcAUGTsT | 617 | AD-14102 | 49% | 3% |
| GAuGucAGcAuAAGcGAuGTsT | 618 | cAUCGCUuAUGCUGAcAUCTsT | 619 | AD-14103 | 74% | 5% |
| ucccAAcAGGuAcGAcAccTsT | 620 | GGUGUCGuACCUGUUGGGATsT | 621 | AD-14104 | 27% | 3% |
| uGcucAcGAuGAGuuuAGuTsT | 622 | ACuAAACUcAUCGUGAGcATsT | 623 | AD-14105 | 34% | 4% |
| AGAGcuuGuuAAAAucGGATsT | 624 | UCCGAUUUuAAcAAGCUCUTsT | 625 | AD-14106 | 9% | 2% |
| GcGuAcAAGAAcAucuAuATsT | 626 | uAuAGAUGUUCUUGuACGCTsT | 627 | AD-14107 | 5% | 1% |
| GAGGuuGuAAGccAAuGuuTsT | 628 | AAcAUUGGCUuAcAACCUCTsT | 629 | AD-14108 | 15% | 1% |
| AAcAGGuAcGAcAccAcAGTsT | 630 | CUGUGGUGUCGuACCUGUUTsT | 631 | AD-14109 | 91% | 2% |
| AAcccuAGuuGuAucccucTsT | 632 | GAGGGAuAcAACuAGGGUUTsT | 633 | AD-14110 | 66% | 5% |
| GcAuAAGcGAuGGAuAAuATsT | 634 | uAUuAUCcAUCGCUuAUGCTsT | 635 | AD-14111 | 33% | 3% |
| AAGcGAuGGAuAAuAccuATsT | 636 | uAGGuAUuAUCcAUCGCUUTsT | 637 | AD-14112 | 51% | 3% |
| uGAuccuGuAcGAAAAGAATsT | 638 | UUCUUUUCGuAcAGGAUcATsT | 639 | AD-14113 | 22% | 3% |
| AAAAcAuuGGccGuucuGGTsT | 640 | CcAGAACGGCcAAUGUUUUTsT | 641 | AD-14114 | 117% | 8% |
| cuuGGAGGGcGuAcAAGAATsT | 642 | UUCUUGuACGCCCUCcAAGTsT | 643 | AD-14115 | 50% | 8% |
| GGcGuAcAAGAAcAucuAuTsT | 644 | AuAGAUGUUCUGGuACGCCTsT | 645 | AD-14116 | 14% | 3% |
| AcucuGAGuAcAuuGGAAuTsT | 646 | AUUCcAAUGuACUcAGAGUTsT | 647 | AD-14117 | 12% | 4% |
| uuAuuAAGGAGuAuAcGGATsT | 648 | UCCGuAuACUCCUuAAuAATST | 649 | AD-14118 | 26% | 4% |
| uAAGGAGuAuAcGGAGGAGTsT | 650 | CUCCUCCGuAuACUCCUuATsT | 651 | AD-14119 | 24% | 5% |
| AAAucAAuAGucAAcuAAATsT | 652 | UUuAGUUGACuAUUGAUUUTsT | 653 | AD-14120 | 8% | 1% |
| AAucAAuAGucAAcuAAAGTsT | 654 | CUUuAGUUGACuAUGGAUUTsT | 655 | AD-14121 | 24% | 2% |
| uucucAGuAuAcuGuGuAATsT | 656 | UuAcAcAGuAuACUGAGAATsT | 657 | AD-14122 | 10% | 1% |
| uGuGAAAcAcucuGAuAAATsT | 658 | UUuAUcAGAGUGUUUcAcATsT | 659 | AD-14123 | 8% | 1% |
| AGAuGuGAAucucuGAAcATsT | 660 | UGUUcAGAGAUUcAcAUCUTsT | 661 | AD-14124 | 9% | 2% |
| AGGuuGuAAGccAAuGuuGTsT | 662 | cAAcAUUGGCUuAcAACCUTsT | 663 | AD-14125 | 114% | 6% |
| uGAGAAAucAGAuGGAcGuTsT | 664 | ACGUCcAUCUGAUUUCUcATsT | 665 | AD-14126 | 9% | 1% |
| AGAAAucAGAuGGAcGuAATsT | 666 | UuACGUCcAUCUGAUUUCUTsT | 667 | AD-14127 | 57% | 6% |
| AuAucccAAcAGGuAcGAcTsT | 668 | GUCGuACCUGUUGGGAuAUTsT | 669 | AD-14128 | 104% | 6% |
| cccAAcAGGuAcGAcAccATsT | 670 | UGGUGUCGuACCUGUUGGGTsT | 671 | AD-14129 | 21% | 2% |
| AGuAuAcuGAAGAAccucuTsT | 672 | AGAGGUUCUUcAGuAuACUTsT | 673 | AD-14130 | 57% | 6% |
| AuAuAuAucAGccGGGcGcTsT | 674 | GCGCCCGGCUGAuAuAuAUTsT | 675 | AD-14131 | 93% | 6% |
| AAucuAAcccuAGuuGuAuTsT | 676 | AuAcAACuAGGGUuAGAUUTsT | 677 | AD-14132 | 75% | 8% |
| cuAAuccuAGuuGuAucccTsT | 678 | GGGAuAcAACuAGGGUuAGTsT | 679 | AD-14133 | 66% | 4% |
| cuAGuuGuAucccuccuuuTsT | 680 | AAAGGAGGGAuAcAACuAGTsT | 681 | AD-14134 | 44% | 6% |
| AGAcAucuGAcuAAuGGcuTsT | 682 | AGCcAUuAGUcAGAUGUCUTsT | 683 | AD-14135 | 55% | 6% |
| GAAGcucAcAAuGAuuuAATsT | 684 | UuAAAUcAUUGUGAGCUUCTsT | 685 | AD-14136 | 29% | 3% |
| AcAuGuAucuuuuucucGATsT | 686 | UCGAGAAAAAGAuAcAUGUTsT | 687 | AD-14137 | 46% | 3% |
| ucGAuucAAAucuuAAcccTsT | 688 | GGGUuAAGAUUUGAAUCGATsT | 689 | AD-14138 | 39% | 5% |
| ucuuAAcccuuAGGAcucuTsT | 690 | AGAGUCCuAAGGGUuAAGATsT | 691 | AD-14139 | 71% | 11% |
| GcucAcGAuGAGuuuAGuGTsT | 692 | cACuAAACUcAUCGUGAGCTsT | 693 | AD-14140 | 43% | 15% |
| cAuAAGcGAuGGAuAAuAcTsT | 694 | GuAUuAUCcAUCGCUuAUGTsT | 695 | AD-14141 | 33% | 6% |
| AuAAGcGAuGGAuAAuAccTsT | 696 | GGuAUuAUCcAUCGCUuAUTsT | 697 | AD-14142 | 51% | 14% |
| ccuAAuAAAcuGcccucAGTsT | 698 | CUGAGGGcAGUUuAUuAGGTsT | 699 | AD-14143 | 42% | 1% |
| ucGGAAAGuuGAAcuuGGuTsT | 700 | ACcAAGUUcAACUUUCCGATsT | 701 | AD-14144 | 4% | 4% |
| GAAAAcAuuGGccGuucuGTsT | 702 | cAGAACGGCcAAUGUUUUCTsT | 703 | AD-14145 | 92% | 5% |
| AAGAcuGAucuucuAAGuuTsT | 704 | AACUuAGAAGAUcAGUCUUTsT | 705 | AD-14146 | 13% | 2% |
| GAGcuuGuuAAAAucGGAATsT | 706 | UUCCGAUUUuAAcAAGCUCTsT | 707 | AD-14147 | 8% | 1% |
| AcAuuGGccGuucuGGAGcTsT | 708 | GCUCcAGAACGGCcAAUGUTsT | 709 | AD-14148 | 80% | 7% |
| AAGAAcAucuAuAAuuGcATsT | 710 | UGcAAUuAuAGAUGUUCUUTsT | 711 | AD-14149 | 44% | 7% |
| AAAuGuGucuAcucAuGuuTsT | 712 | AAcAUGAGuAGAcAcAUUUTsT | 713 | AD-14150 | 32% | 29% |
| uGucuAcucAuGuuucucATsT | 714 | UGAGAAAcAUGAGuAGAcATsT | 715 | AD-14151 | 75% | 11% |
| GuAuAcuGuGuAAcAAucuTsT | 716 | AGAUUGUuAcAcAGuAuACTsT | 717 | AD-14152 | 8% | 5% |
| uAuAcuGuGuAAcAAucuATsT | 718 | uAGAUUGUuAcAcAGuAuATsT | 719 | AD-14153 | 17% | 11% |
| cuuAGuAGuGuccAGGAAATsT | 720 | UUUCCUGGAcACuACuAAGTsT | 721 | AD-14154 | 16% | 4% |
| ucAGAuGGAcGuAAGGcAGTsT | 722 | CUGCCUuACGUCcAUCUGATsT | 723 | AD-14155 | 11% | 1% |
| AGAuAAAuuGAuAGcAcAATsT | 724 | UUGUGCuAUcAAUUuAUCUTsT | 725 | AD-14156 | 10% | 1% |
| cAAcAGGuAcGAcAccAcATsT | 726 | UGUGGUGUCGuACCGGUUGTsT | 727 | AD-14157 | 29% | 3% |
| uGcAAuGuAAAuAcGuAuuTsT | 728 | AAuACGuAUUuAcAUUGcATsT | 729 | AD-14158 | 51% | 3% |
| AGucAGAAuuuuAucuAGATsT | 730 | UCuAGAuAAAAUUCUGACUTsT | 731 | AD-14159 | 53% | 5% |
| cuAGAAAucuuuuAAcAccTsT | 732 | GGUGUuAAAAGAUUUCuAGTsT | 733 | AD-14160 | 40% | 3% |
| AAuAAAucuAAcccuAGuuTsT | 734 | AACuAGGGUuAGAUUuAUUTsT | 735 | AD-14161 | 83% | 7% |
| AAuuuucuGcucAcGAuGATsT | 736 | UcAUCGUGAGcAGAAAAUUTsT | 737 | AD-14162 | 44% | 6% |
| GcccucAGuAAAuccAuGGTsT | 738 | CcAUGGAUUuACUGAGGGCTsT | 739 | AD-14163 | 57% | 3% |
| AcGuuuAAAAcGAGAucuuTsT | 740 | AAGAUCUCGUUUuAAACGUTsT | 741 | AD-14164 | 4% | 1% |
| AGGAGAuAGAAcGuuuAAATsT | 742 | UUuAAACGUUCuAUCUCCUTsT | 743 | AD-14165 | 11% | 1% |
| GAccGucAuGGcGucGcAGTsT | 744 | CUGCGACGCcAUGACGGUCTsT | 745 | AD-14166 | 90% | 5% |
| AccGucAuGGcGucGcAGcTsT | 746 | GCUGCGACGCcAUGACGGUTsT | 747 | AD-14167 | 49% | 1% |
| GAAcGuuuAAAAcGAGAucTsT | 748 | GAUCUCGUUUuAAACGUUCTsT | 749 | AD-14168 | 12% | 2% |
| uuGAGcuuAAcAuGGuAATsT | 750 | UuACCuAUGUuAAGCUcAATST | 751 | AD-14169 | 66% | 4% |
| AcuAAAuuGAucucGuAGATsT | 752 | UCuACGAGAUcAAUUuAGUTsT | 753 | AD-14170 | 52% | 6% |
| ucGuAGAAuuAucuuAAuATsT | 754 | uAUuAAGAuAAUUCuACGATsT | 755 | AD-14171 | 42% | 4% |
| GGAGAuAGAAcGuuuAAAATsT | 756 | UUUuAAACGUUCuAUCUCCTsT | 757 | AD-14172 | 3% | 1% |
| AcAAcuuAuuGGAGGuuGuTsT | 758 | AcAACCUCcAAuAAGUUGUTsT | 759 | AD-14173 | 29% | 2% |
| uGAGcuuAAcAuAGGuAAATsT | 760 | UUuACCuAUGUuAAGCUcATsT | 761 | AD-14174 | 69% | 2% |
| AucucGuAGAAuuAucuuATsT | 762 | uAAGAuAAUUCuACGAGAUTsT | 763 | AD-14175 | 53% | 3% |
| cuGcGuGcAGucGGuccucTsT | 764 | GAGGACCGACUGcACGcAGTsT | 765 | AD-14176 | 111% | 4% |
| cAcGcAGcGcccGAGAGuATsT | 766 | uACUCUCGGGCGCUGCGUGTsT | 767 | AD-14177 | 87% | 6% |
| AGuAccAGGGAGAcuccGGTsT | 768 | CCGGAGUCUCCCUGGuACUTsT | 769 | AD-14178 | 59% | 2% |
| AcGGAGGAGAuAGAAcGuuTsT | 770 | AACGUUCuAUCUCCUCCGUTsT | 771 | AD-14179 | 9% | 2% |
| AGAAcGuuuAAAAcGAGAuTsT | 772 | AUCUCGUUUuAAACGUUCUTsT | 773 | AD-14180 | 43% | 2% |
| AAcGuuuAAAAcGAGAucuTsT | 774 | AGAUCUCGUUUuAAACGUUTsT | 775 | AD-14181 | 70% | 10% |
| AGcuuGAGcuuAAcAuAGGTsT | 776 | CCuAUGUuAAGCUcAAGCUTsT | 777 | AD-14182 | 100% | 7% |
| AGcuuAAcAuGGuAAAuATsT | 778 | uAUUuACCuAUGUuAAGCUTsT | 779 | AD-14183 | 60% | 5% |
| uAGAGcuAcAAAAccuAucTsT | 780 | GAuAGGUUUUGuAGCUCuATsT | 781 | AD-14184 | 129% | 6% |
| uAGuuGuAucccuccuuuATsT | 782 | uAAAGGAGGGAuAcAACuATsT | 783 | AD-14185 | 62% | 4% |
| AccAcccAGAcAucuGAcuTsT | 784 | AGUcAGAUGUCUGGGUGGUTsT | 785 | AD-14186 | 42% | 3% |
| AGAAAcuAAAuuGAucucGTsT | 786 | CGAGAUcAAUUuAGUUUCUTsT | 787 | AD-14187 | 123% | 12% |
| ucucGuAGAAuuAucuuAATsT | 788 | UuAAGAuAAUUCuACGAGATsT | 789 | AD-14188 | 38% | 2% |
| cAAcuuAuuGGAGGuuGuATsT | 790 | uAcAACCUCcAAuAAGUUGTsT | 791 | AD-14189 | 13% | 1% |
| uuGuAucccuccuuuAAGuTsT | 792 | ACUuAAAGGAGGGAuAcAATsT | 793 | AD-14190 | 59% | 3% |
| ucAcAAcuuAuuGGAGGuuTsT | 794 | AACCUCcAAuAAGUUGUGATsT | 795 | AD-14191 | 93% | 3% |
| AGAAcuGuAcucuucucAGTsT | 796 | CUGAGAAGAGuAcAGUUCUTsT | 797 | AD-14192 | 45% | 5% |
| GAGcuuAAcAuGGuAAAuTsT | 798 | AUUuACCuAUGUuAAGCUCTsT | 799 | AD-14193 | 57% | 3% |
| cAccAAcAucuGuccuuAGTsT | 800 | CuAAGGAcAGAUGUUGGUGTsT | 801 | AD-14194 | 51% | 4% |
| AAAGcccAcuucAGAGuAuTsT | 802 | AuACUCuAAAGUGGGCUUUTsT | 803 | AD-14195 | 77% | 5% |
| AAGcccAcuuuAGAGuAuATsT | 804 | uAuACUCuAAAGUGGGCUUTsT | 805 | AD-14196 | 42% | 6% |
| GAccuuAuuuGGuAAucuGTsT | 806 | cAGAUuACcAAAuAAGGUCTsT | 807 | AD-14197 | 15% | 2% |
| GAuuAAuGuAcucAAGAcuTsT | 808 | AGUCUUGAGuAcAUuAAUCTsT | 809 | AD-14198 | 12% | 2% |
| cuuuAAGAGGccuAAcucATsT | 810 | UGAGUuAGGCCUCUuAAAGTsT | 811 | AD-14199 | 18% | 2% |
| uuAAAccAAAcccuAuuGATsT | 812 | UcAAuAGGGUUUGGUUuAATsT | 813 | AD14200 | 72% | 9% |
| ucuGuuGGAGAucuAuAAuTsT | 814 | AUuAuAGAUCUCcAAcAGATsT | 815 | AD-14201 | 9% | 3% |
| cuGAuGuuucuGAGAGAcuTsT | 816 | AGUCUCUcAGAAAcAUcAGTsT | 817 | AD-14202 | 25% | 3% |
| GcAuAcucuAGucGuucccTsT | 818 | GGGAACGACuAGAGuAUGCTsT | 819 | AD-14203 | 21% | 1% |
| GuuccuuAucGAGAAucuATsT | 820 | uAGAUUCUCGAuAAGGAACTsT | 821 | AD-14204 | 4% | 2% |
| GcAcuuGGAucucucAcAuTsT | 822 | AUGUGAGAGAUCcAAGUGCTsT | 823 | AD-14205 | 5% | 1% |
| AAAAAAGGAAcuAGAuGGcTsT | 824 | GCcAUCuAGUUCCUUUUUUTsT | 825 | AD-14206 | 79% | 6% |
| AGAGcAGAuuAccucuGcGTsT | 826 | CGcAGAGGuAAUCUGCUCUTsT | 827 | AD-14207 | 55% | 2% |
| AGcAGAuuAccucuGcGAGTsT | 828 | CUCGcAGAGGuAAUCUGCUTsT | 829 | AD-14208 | 100% | 4% |
| cccuGAcAGAGuucAcAAATsT | 830 | UUUGUGAACUCUGUcAGGGTsT | 831 | AD-14209 | 34% | 3% |
| GuuuAccGAAGuGuuGuuuTsT | 832 | AAAcAAcACUUCGGuAAACTsT | 833 | AD-14210 | 13% | 2% |
| uuAcAGuAcAcAAcAAGGATsT | 834 | UCCUUGUUGUGuACUGuAATsT | 835 | AD-14211 | 9% | 1% |
| AcuGGAucGuAAGAAGGcATsT | 836 | UGCCUUCUuACGAUCcAGUTsT | 837 | AD-14212 | 20% | 3% |
| GAGcAGAuuAccucuGcGATsT | 838 | UCGcAGAGGuAAUCUGCUCTsT | 839 | AD-14213 | 48% | 5% |
| AAAAGAAGuuAGuGuAcGATsT | 840 | UCGuAcACuAACUUCUUUUTsT | 841 | AD-14214 | 28% | 18% |
| GAccAuuuAAuuuGGcAGATsT | 842 | UCUGCcAAAUuAAAUGGUCTsT | 843 | AD-14215 | 132% | 0% |
| GAGAGGAGuGAuAAuuAAATsT | 844 | UUuAAUuAUcACUCCUCUCTsT | 845 | AD-14216 | 3% | 0% |
| cuGGAGGAuuGGcuGAcATTsT | 846 | UUGUcAGCcAAUCCUCcAGTsT | 847 | AD-14217 | 19% | 1% |
| cucuAGucGuucccAcucATsT | 848 | UGAGUGGGAACGACuAGAGTsT | 849 | AD-14218 | 67% | 8% |
| GAuAccAuuAcuAcAGuAGTsT | 850 | CuACUGuAGuAAUGGuAUCTsT | 851 | AD-14219 | 76% | 4% |
| uucGucuGcGAAGAAGAAATsT | 852 | UUUCUUCUUCGcAGACGAATsT | 853 | AD-14220 | 33% | 8% |
| GAAAAGAAGuuAGuGuAcGTsT | 854 | CGuAcACuAACUUCUUUUCTsT | 855 | AD-14221 | 25% | 2% |
| uGAuGuuuAccGAAGuGuuTsT | 856 | AAcACUUCGGuAAAcAUcATsT | 857 | AD-14222 | 7% | 2% |
| uGuuuGuccAAuucuGGAuTsT | 858 | AUCcAGAAUUGGAcAAAcATsT | 859 | AD-14223 | 19% | 2% |
| AuGAAGAGuAuAccuGGGATsT | 860 | UCCcAGGuAuACUCUUcAUTsT | 861 | AD-14224 | 13% | 1% |
| GcuAcucuGAuGAAuGcAuTsT | 862 | AUGcAUUcAUcAGAGuAGCTsT | 863 | AD-14225 | 15% | 2% |
| GcccuuGuAGAAAGAAcAcTsT | 864 | GUGUUCUUUCuAcAAGGGCTsT | 865 | AD-14226 | 11% | 0% |
| ucAuGuuccuuAucGAGAATsT | 866 | UUCUCGAuAAGGAAcAUGATsT | 867 | AD-14227 | 5% | 1% |
| GAAuAGGGuuAcAGAGuuGTsT | 868 | cAACUCUGuAACCCuAUUCTsT | 869 | AD-14228 | 34% | 3% |
| cAAAcuGGAucGuAAGAAGTsT | 870 | CUUCUuACGAUCcAGUUUGTsT | 871 | AD-14229 | 15% | 2% |
| cuuAuuuGGuAAucuGcuGTsT | 872 | cAGcAGAUuACcAAAuAAGTsT | 873 | AD-14230 | 20% | 1% |
| AGcAAuGuGGAAAccuAAcTsT | 874 | GUuAGGUUUCcAcAUUGCUTsT | 875 | AD-14231 | 18% | 1% |
| AcAAuAAAGcAGAcccAuuTsT | 876 | AAUGGGUCUGCUUuAUUGUTsT | 877 | AD-14232 | 23% | 1% |
| AAccAcuuAGuAGuGuccATsT | 878 | UGGAcACuACuAAGUGGUUTsT | 879 | AD-14233 | 106% | 12% |
| AGucAAGAGccAucuGuAGTsT | 880 | CuAcAGAUGGCUCUUGACUTsT | 881 | AD-14234 | 35% | 3% |
| cucccuAGAcuucccuAuuTsT | 882 | AAuAGGGAAGUCuAGGGAGTsT | 883 | AD-14235 | 48% | 4% |
| AuAGcuAAAuuAAAccAAATsT | 884 | UGUGGUUuAAUUuAGCuAUTsT | 885 | AD-14236 | 23% | 3% |
| uGGcuGGuAuAAuuccAcGTsT | 886 | CGUGGAAUuAuACcAGCcATsT | 887 | AD-14237 | 79% | 9% |
| uuAuuuGGuAAucuGcuGuTsT | 888 | AcAGcAGAUuACcAAAuAATsT | 889 | AD-14238 | 92% | 7% |
| AAcuAGAuGGcuuucucAGTsT | 890 | CUGAGAAAGCcAUCuAGUUTsT | 891 | AD-14239 | 20% | 2% |
| ucAuGGcGucGcAGccAAATsT | 892 | UUUGGCUGCGACGCcAUGATsT | 893 | AD-14240 | 71% | 6% |
| AcuGGAGGAuuGGcuGAcATsT | 894 | UGUcAGCcAAUCCUCcAGUTsT | 895 | AD-14241 | 14% | 1% |
| cuAuAAuuGcAcuAucuuuTsT | 896 | AAAGAuAGUGcAAUuAuAGTsT | 897 | AD-14242 | 11% | 2% |
| AAAGGucAccuAAuGAAGATsT | 898 | UCUUcAUuAGGUGACCUUUTsT | 899 | AD-14243 | 11% | 1% |
| AuGAAuGcAuAcucuAGucTsT | 900 | GACuAGAGuAUGcAUUcAUTsT | 901 | AD-14244 | 15% | 2% |
| AAcAuAuuGAAuAAGccuGTsT | 902 | cAGGCUuAUUcAAuAUGUUTsT | 903 | AD-14245 | 80% | 7% |
| AAGAAGGcAGuuGAccAAcTsT | 904 | GUUGGUcAACUGCCUUCUUTsT | 905 | AD-14246 | 57% | 5% |
| GAuAcuAAAAGAAcAAucATsT | 906 | UGAUUGUUCUUUuAGuAUCTsT | 907 | AD-14247 | 9% | 3% |
| AuAcuGAAAAucAAuAGucTsT | 908 | GACuAUUGAUUUUcAGuAUTsT | 909 | AD-14248 | 39% | 4% |
| AAAAAGGAAcuAGAuGGcuTsT | 910 | AGCcAUCuAGUUCCUUUUUTsT | 911 | AD-14249 | 64% | 2% |
| GAAcuAGAuGGcuuucucATsT | 912 | UGAGAAAGCcAUCuAGUUCTsT | 913 | AD-14250 | 18% | 2% |
| GAAAccuAAcuGAAGAccuTsT | 914 | AGGUCUUcAGUuAGGUUUCTsT | 915 | AD-14251 | 56% | 6% |
| uAcccAucAAcAcuGGuAATsT | 916 | UuACcAGUGUUGAUGGGuATsT | 917 | AD-14252 | 48% | 6% |
| AuuuuGAuAucuAcccAuuTsT | 918 | AAUGGGuAGAuAUcAAAAUTsT | 919 | AD-14253 | 39% | 5% |
| AucccuAuAGuucAcuuuGTsT | 920 | cAAAGUGAACuAuAGGGAUTsT | 921 | AD-14254 | 44% | 8% |
| AuGGGcuAuAAuuGcAcuATsT | 922 | uAGUGcAAUuAuAGCCcAUTsT | 923 | AD-14255 | 108% | 8% |
| AGAuuAccucuGcGAGcccTsT | 924 | GGGCUCGcAGAGGuAAUCUTsT | 925 | AD-14256 | 108% | 6% |
| uAAuuccAcGuAcccuucATsT | 926 | UGAAGGGuACGUGGAAUuATsT | 927 | AD-14257 | 23% | 2% |
| GucGuucccAcucAGuuuuTsT | 928 | AAAACuGAGuGGGAACGACTsT | 929 | AD-14258 | 21% | 3% |
| AAAucAAucccuGuuGAcuTsT | 930 | AGUcAAcAGGGAUUGAUUUTsT | 931 | AD-14259 | 19% | 2% |
| ucAuAGAGcAAAGAAcAuATsT | 932 | uAUGUUCUUUGCUCuAUGATsT | 933 | AD-14260 | 10% | 1% |
| uuAcuAcAGuAGcAcuuGGTsT | 934 | CcAAGUGCuACUGuAGuAATsT | 935 | AD-14261 | 76% | 3% |
| AuGuGGAAAccuAAcuGAATsT | 936 | UUcAGUuAGGUUUCcAcAUTsT | 937 | AD-14262 | 13% | 2% |
| uGuGGAAAccuAAcuGAAGTsT | 938 | CUUcAGUuAGGUUUCcAcATsT | 939 | AD-14263 | 14% | 2% |
| ucuuccuuAAAuGAAAGGGTsT | 940 | CCCUUUcAUUuAAGGAAGATsT | 941 | AD-14264 | 65% | 3% |
| uGAAGAAccucuAAGucAATsT | 942 | UUGACUuAGAGGUUCUUcATsT | 943 | AD-14265 | 13% | 1% |
| AGAGGucuAAAGuGGAAGATsT | 944 | UCUUCcACUUuAGACCUCUTsT | 945 | AD-14266 | 18% | 3% |
| AuAucuAcccAuuuuucuGTsT | 946 | cAGAAAAAUGGGuAGAuAUTsT | 947 | AD-14267 | 50% | 9% |
| uAAGccuGAAGuGAAucAGTsT | 948 | CUGAUUcACUUcAGGCUuATsT | 949 | AD-14268 | 13% | 3% |
| AGAuGcAGAccAuuuAAuuTsT | 950 | AAUuAAAUGGUCUGcAUCUTsT | 951 | AD-14269 | 19% | 4% |
| AGuGuuGuuuGuccAAuucTsT | 952 | GAAUUGGAcAAAcAAcACUTsT | 953 | AD-14270 | 11% | 2% |
| cuAuAAuGAAGAGcuuuuuTsT | 954 | AAAAAGCUCUUcAUuAuAGTsT | 955 | AD-14271 | 11% | 1% |
| AGAGGAGuGAuAAuuAAAGTsT | 956 | CUUuAAUuAUcACUCCUCUTsT | 957 | AD-14272 | 7% | 1% |
| uuucucuGuuAcAAuAcAuTsT | 958 | AUGuAUUGuAAcAGAGAAATsT | 959 | AD-14273 | 14% | 2% |
| AAcAucuAuAAuuGcAAcATsT | 960 | UGUUGcAAUuAuAGAUGUUTsT | 961 | AD-14274 | 73% | 4% |
| uGcuAGAAGuAcAuAAGAcTsT | 962 | GUCUuAUGuACUUCuAGcATsT | 963 | AD-14275 | 10% | 1% |
| AAuGuAcucAAGAcuGAucTsT | 964 | GAUcAGUCUUGAGuAcAUUTsT | 965 | AD-14276 | 89% | 2% |
| GuAcucAAGAcuGAucuucTsT | 966 | GAAGAUcAGUCUUGAGuACTsT | 967 | AD-14277 | 7% | 1% |
| cAcucuGAuAAAcucAAuGTsT | 968 | cAUUGAGUUuAUcAGAGUGTsT | 969 | AD-14278 | 12% | 1% |
| AAGAGcAGAuuAccucuGcTsT | 970 | GcAGAGGuAAUCGGCUCUUTsT | 971 | AD-14279 | 104% | 3% |
| ucuGcGAGcccAGAucAAcTsT | 972 | GUUGAUCUGGGCUCGcAGATsT | 973 | AD-14280 | 21% | 2% |
| AAcuuGAGccuuGuGuAcATsT | 974 | uAuAcAcAAGGCUcAAGUUTsT | 975 | AD-14281 | 43% | 3% |
| GAAuAuAuAuAucAGccGGTsT | 976 | CCGGCUGAuAuAuAuAUUCTsT | 977 | AD-14282 | 45% | 6% |
| uGucAucccuAuAGuucAcTsT | 978 | GUGAACuAuAGGGAUGAcATsT | 979 | AD-14283 | 35% | 5% |
| GAucuGGcAAccAuAuuucTsT | 980 | GAAAuAUGGUUGCcAGAUCTsT | 981 | AD-14284 | 58% | 3% |
| uGGcAAccAuAuuucuGGATsT | 982 | UCcAGAAAuAUGGUUGCcATsT | 983 | AD-14285 | 48% | 3% |
| GAuGuuuAccGAAGuGuuGTsT | 984 | cAAcACUUCGGuAAAcAUCTsT | 985 | AD-14286 | 49% | 3% |
| uuccuuAucGAGAAucuAATsT | 986 | UuAGAUUCUCGAuAAGGAATsT | 987 | AD-14287 | 6% | 1% |
| AGcuuAAuuGcuuucuGGATsT | 988 | UCcAGAAAGcAAUuAAGCUTsT | 989 | AD-14288 | 50% | 2% |
| uuGcuAuuAuGGGAGAccATsT | 990 | UGGUCUCCcAuAAuAGcAATsT | 991 | AD-14289 | 48% | 1% |
| GucAuGGcGucGcAGccAATsT | 992 | UUGGCUGCGACGCcAUGACTsT | 993 | AD-14290 | 112% | 7% |
| uAAuuGcAcuAucuuuGcGTsT | 994 | CGcAAAGAuAGUGcAAUcATsT | 995 | AD-14291 | 77% | 2% |
| cuAucuuuGcGuAuGGccATsT | 996 | UGGCcAuACGcAAAGAuAGTsT | 997 | AD-14292 | 80% | 6% |
| ucccuAuAGuucAcuuuGuTsT | 998 | AcAAAGUGAACuAuAGGGATsT | 999 | AD-14293 | 58% | 2% |
| ucAAccuuuAAuucAcuuGTsT | 1000 | cAAGUGAAUuAAAGGUUGATsT | 1001 | AD-14294 | 77% | 2% |
| GGcAAccAuAuuucuGGAATsT | 1002 | UUCcAGAAAuAUGGUUGCCTsT | 1003 | AD-14295 | 62% | 2% |
| AuGuAcucAAGAcuGAucuTsT | 1004 | AGAUcAGUCUUGAGuAcAUTsT | 1005 | AD-14296 | 59% | 4% |
| GcAGAccAuuuAAuuuGGcTsT | 1006 | GCcAAAUuAAAUGGUCUGCTsT | 1007 | AD-14297 | 37% | 1% |
| ucuGAGAGAcuAcAGAuGuTsT | 1008 | AcAUCUGuAGUCUCUcAGATsT | 1009 | AD-14298 | 21% | 1% |
| uGcucAuAGAGcAAAGAAcTsT | 1010 | GUUCUUUGCUGuAUGAGcATsT | 1011 | AD-14299 | 6% | 1% |
| AcAuAAGAccuuAuuuGGuTsT | 1012 | ACcAAAuAAGGUCUcAUGUTsT | 1013 | AD-14300 | 17% | 2% |
| uuuGuGcuGAuucuGAuGGTsT | 1014 | CcAUcAGAAUcAGcAcAAATsT | 1015 | AD-14301 | 97% | 6% |
| ccAucAAcAcuGGuAAGAATsT | 1016 | UUCUuACcAGUGUUGAUGGTsT | 1017 | AD-14302 | 13% | 1% |
| AGAcAAuuccGGAuGuGGATsT | 1018 | UCcAcAUCCGGAAUUGUCUTsT | 1019 | AD-14303 | 13% | 3% |
| GAAcuuGAGccuuGuGuAuTsT | 1020 | AuAcAcAAGGCUcAAGUUCTsT | 1021 | AD-14304 | 38% | 2% |
| uAAuuuGGcAGAGcGGAAATsT | 1022 | UUUCCGCUCUGCcAAAUuATsT | 1023 | AD-14305 | 14% | 2% |
| uGGAuGAAGuuAuuAuGGGTsT | 1024 | CCcAuAAuAACUUcAUCcATsT | 1025 | AD-14306 | 22% | 4% |
| AucuAcAuGAAcuAcAAGATsT | 1026 | UCUUGuAGUUcAUGuAGAUTsT | 1027 | AD-14307 | 26% | 6% |
| GGuAuuuuuGAucuGGcAATsT | 1028 | UUGCcAGAUcAAAAAuACCTsT | 1029 | AD-14308 | 62% | 8% |
| cuAAuGAAGAGuAuAccuGTsT | 1030 | cAGGuAuACUCUUcAUuAGTsT | 1031 | AD-14309 | 52% | 5% |
| uuuGAGAAAcuuAcuGAuATsT | 1032 | uAUcAGuAAGUUUCUcAAATsT | 1033 | AD-14310 | 32% | 3% |
| cGAuAAGAuAGAAGAucAATsT | 1034 | UUGAUCUUCuAUCGuAUCGTsT | 1035 | AD-14311 | 23% | 2% |
| cuGGcAAccAuAuuucuGGTsT | 1036 | CcAGAAAuAUGGUUGCcAGTsT | 1037 | AD-14312 | 49% | 6% |
| uAGAuAccAuuAcuAcAGuTsT | 1038 | ACUGuAGuAAUGGuAUCuATsT | 1039 | AD-14313 | 69% | 4% |
| GuAuuAAAuuGGGuuucAuTsT | 1040 | AUGAAACCcAAUUuAAuACTsT | 1041 | AD-14314 | 52% | 3% |
| AAGAccuuAuuuGGuAAucTsT | 1042 | GAUuACcAAAuAAGGUCUUTsT | 1043 | AD-14315 | 66% | 4% |
| GcuGuuGAuAAGAGAGcucTsT | 1044 | GAGCUCUCUuAUcAAcAGCTsT | 1045 | AD-14316 | 19% | 4% |
| uAcucAuGuuucucAGAuuTsT | 1046 | AAUCUGAGAAAcAUGAGuATsT | 1047 | AD-14317 | 16% | 5% |
| cAGAuGGAcGuAAGGcAGcTsT | 1048 | GCUGCCUuACGUCcAUCUGTsT | 1049 | AD-14318 | 52% | 11% |
| uAucccAAcAGGuAcGAcATsT | 1050 | UGUCGuACCUGUUGGGAuATsT | 1051 | AD-14319 | 28% | 11% |
| cAuuGcuAuuAuGGGAGAcTsT | 1052 | GUCUCCcAuAAuAGcAAUGTsT | 1053 | AD-14320 | 52% | 10% |
| cccucAGuAAAuccAuGGuTsT | 1054 | ACcAUGGAUUuACUGAGGGTsT | 1055 | AD-14321 | 53% | 6% |
| GGucAuuAcuGcccuuGuATsT | 1056 | uAcAAGGGcAGuAAUGACCTsT | 1057 | AD-14322 | 20% | 2% |
| AAccAcucAAAAAcAuuuGTsT | 1058 | cAAAUGUUUUUGAGUGGUUTsT | 1059 | AD-14323 | 116% | 6% |
| uuuGcAAGuuAAuGAAucuTsT | 1060 | AGAUUcAUuAACUUGcAAATsT | 1061 | AD-14324 | 14% | 2% |
| uuAuuuucAGuAGucAGAATsT | 1062 | UUCUGACuACUGAAAAuAATsT | 1063 | AD-14325 | 50% | 2% |
| uuuucucGAuucAAAucuuTsT | 1064 | AAGAUUuGAAUCGAGAAAATsT | 1065 | AD-14326 | 47% | 3% |
| GuAcGAAAAGAAGuuAGuGTsT | 1066 | cACuAACUUCUUUUCGuACTsT | 1067 | AD-14327 | 18% | 2% |
| uuuAAAAcGAGAucuuGcuTsT | 1068 | AGcAAGAUCUCGUUUuAAATsT | 1069 | AD-14328 | 19% | 1% |
| GAAuuGAuuAAuGuAcucATsT | 1070 | UGAGuAcAUuAAUcAAUUCTsT | 1071 | AD-14329 | 94% | 10% |
| GAuGGAcGuAAGGcAGcucTsT | 1072 | GAGCUGCCUuACGUCcAUCTsT | 1073 | AD-14330 | 60% | 4% |
| cAucuGAcuAAuGGcucuGTsT | 1074 | cAGAGCcAUuAGUcAGAUGTsT | 1075 | AD-14331 | 54% | 7% |
| GuGAuccuGuAcGAAAAGATsT | 1076 | UCUUUUCGuAcAGGAUcACTsT | 1077 | AD-14332 | 22% | 4% |
| AGcucuuAuuAAGGAGuAuTsT | 1078 | AuACUCCUuAAuAAGAGCUTsT | 1079 | AD-14333 | 70% | 10% |
| GcucuuAuuAAGGAGuAuATsT | 1080 | uAuACUCCUuAAuAAGAGCTsT | 1081 | AD-14334 | 18% | 3% |
| ucuuAuuAAGGAGuAuAcGTsT | 1082 | CGuAuACUCCUuAAuAAGATsT | 1083 | AD-14335 | 38% | 6% |
| uAuuAAGGAGuAuAcGGAGTsT | 1084 | CUCCGuAuACUCCUuAAuATsT | 1085 | AD-14336 | 16% | 3% |
| cuGcAGcccGuGAGAAAAATsT | 1086 | UUUUCUcACGGGCUGcAGTsT | 1087 | AD-14337 | 65% | 4% |
| ucAAGAcuGAucuucuAAGTsT | 1088 | CUuAGAAGAUcAGUCUUGATsT | 1089 | AD-14338 | 18% | 0% |
| cuucuAAGuucAcuGGAAATsT | 1090 | UUUCcAGUGAACUuAGAAGTsT | 1091 | AD-14339 | 20% | 4% |
| uGcAAGuuAAuGAAucuuuTsT | 1092 | AAAGAUUcAUuAACUUGcATsT | 1093 | AD-14340 | 24% | 1% |
| AAucuAAGGAuAuAGucAATsT | 1094 | UUGACuAuAUCCUuAGAUUTsT | 1095 | AD-14341 | 27% | 3% |
| AucucuGAAcAcAAGAAcATsT | 1096 | UGUUCUUGUGUUcAGAGAUTsT | 1097 | AD-14342 | 13% | 1% |
| uucuGAAcAGuGGGuAucuTsT | 1098 | AGAuACCcACUGUUcAGAATsT | 1099 | AD-14343 | 19% | 1% |
| AGuuAuuuAuAcccAucAATsT | 1100 | UUGAUGGGuAuAAAuAACUTsT | 1101 | AD-14344 | 23% | 2% |
| AuGcuAAAcuGuucAGAAATsT | 1102 | GUUCUGAAcAGUUuAGcAUTsT | 1103 | AD-14345 | 21% | 4% |
| cuAcAGAGcAcuuGGuuAcTsT | 1104 | GuAACcAAGUGCUCUGuAGTsT | 1105 | AD-14346 | 18% | 2% |
| uAuAuAucAGccGGGcGcGTsT | 1106 | CGCGCCCGGCUGAuAuAuATsT | 1107 | AD-14347 | 67% | 2% |
| AuGuAAAuAcGuAuuucuATsT | 1108 | uAGAAAuACGuAUUuAcAUTsT | 1109 | AD-14348 | 39% | 3% |
| uuuuucucGAuucAAAucuTsT | 1110 | AGAUUuGAAUCGAGAAAAATsT | 1111 | AD-14349 | 83% | 6% |
| AAucuuAAcccuuAGGAcuTsT | 1112 | AGUCCuAAGGGUuAAGAUUTsT | 1113 | AD-14350 | 54% | 2% |
| ccuuAGGAcucuGGuAuuuTsT | 1114 | AAAuACcAGAGUCCuAAGGTsT | 1115 | AD-14351 | 57% | 8% |
| AAuAAAcuGcccucAGuAATsT | 1116 | UuACUGAGGGcAGUUuAUUTsT | 1117 | AD-14352 | 82% | 3% |
| GAuccuGuAcGAAAAGAAGTsT | 1118 | CUUCUUUUCGuAcAGGAUCTsT | 1119 | AD-14353 | 2% | 1% |
| AAuGuGAuccuGuAcGAAATsT | 1120 | UUUCGuAcAGGAUcAcAUUTsT | 1121 | AD-14354 | 18% | 11% |
| GuGAAAAcAuuGGccGuucTsT | 1122 | GAACGGCcAAUGUUUUcACTsT | 1123 | AD-14355 | 2% | 1% |
| cuuGAGGAAAcucuGAGuATsT | 1124 | uACUcAGAGUUUCCUcAAGTsT | 1125 | AD-14356 | 8% | 2% |
| cGuuuAAAAcGAGAucuuGTsT | 1126 | cAAGAUCUCGUUUuAAACGTsT | 1127 | AD-14357 | 6% | 3% |
| uuAAAAcGAGAucuuGcuGTsT | 1128 | cAGcAAGAUCUCGUUUuAATsT | 1129 | AD-14358 | 98% | 17% |
| AAAGAuGuAucuGGucuccTsT | 1130 | GGAGACcAGAuAcAUCUUUTsT | 1131 | AD-14359 | 10% | 1% |
| cAGAAAAuGuGucuAcucATsT | 1132 | UGAGuAGAcAcAUUUUCUGTsT | 1133 | AD-14360 | 6% | 4% |
| cAGGAAuuGAuuAAuGuAcTsT | 1134 | GuAcAUuAAUcAAUUCCUGTsT | 1135 | AD-14361 | 30% | 5% |
| AGucAAcuAAAGcAuAuuuTsT | 1136 | AAAuAUGCUUuAGUUGACUTsT | 1137 | AD-14362 | 28% | 2% |
| uGuGuAAcAAucuAcAuGATsT | 1138 | UcAUGuAGAUUGUuAcAcATsT | 1139 | AD-14363 | 60% | 6% |
| AuAccAuuuGuuccuuGGuTsT | 1140 | ACcAAGGAAcAAAUGGuAUTsT | 1141 | AD-14364 | 12% | 9% |
| GcAGAAAucuAAGGAuAuATsT | 1142 | uAuAUCCUuAGAUUUCUGCTsT | 1143 | AD-14365 | 5% | 2% |
| uGGcuucucAcAGGAAcucTsT | 1144 | GAGUUCCUGUGAGAAGCcATsT | 1145 | AD-14366 | 28% | 5% |
| GAGAuGuGAAucucuGAAcTsT | 1146 | GUUcAGAGAUUcAcAUCUCTsT | 1147 | AD-14367 | 42% | 4% |
| uGuAAGccAAuGuuGuGAGTsT | 1148 | CUcAcAAcAUUGGCUuAcATsT | 1149 | AD-14368 | 93% | 12% |
| AGccAAuGuuGuGAGGcuuTsT | 1150 | AAGCCUcAcAAcAUUGGCUTsT | 1151 | AD-14369 | 65% | 4% |
| uuGuGAGGcuucAAGuucATsT | 1152 | UGAACUUGAAGCCUcAcAATsT | 1153 | AD-14370 | 5% | 2% |
| AGGcAGcucAuGAGAAAcATsT | 1154 | UGUUUCUcAUGAGCUGCCUTsT | 1155 | AD-14371 | 54% | 5% |
| AuAAAuuGAuAGcAcAAAATsT | 1156 | UUUUGUGCuAUcAAUUuAUTsT | 1157 | AD-14372 | 4% | 1% |
| AcAAAAucuAGAAcuuAAuTsT | 1158 | AUuAAGUUCuAGAUUUUGUTsT | 1159 | AD-14373 | 6% | 1% |
| GAuAucccAAcAGGuAcGATsT | 1160 | UCGuACCUGUUGGGAuACUTsT | 1161 | AD-14374 | 92% | 6% |
| AAGuuAuuuAuAcccAucATsT | 1162 | UGAUGGGuAuAAAuAACUUTsT | 1163 | AD-14375 | 76% | 4% |
| uGuAAAuAcGuAuuucuAGTsT | 1164 | CuAGAAAuACGuAUUuAcATsT | 1165 | AD-14376 | 70% | 5% |
| ucuAGuuuucAuAuAAAGuTsT | 1166 | ACUUuAuAUGAAAACuAGATsT | 1167 | AD-14377 | 48% | 4% |
| AuAAAGuAGuucuuuuAuATsT | 1168 | uAuAAAAGAACuACUUuAUTsT | 1169 | AD-14378 | 48% | 3% |
| ccAuuuGuAGAGcuAcAAATsT | 1170 | UUUGuAGCUCuAcAAAUGGTsT | 1171 | AD-14379 | 44% | 5% |
| uAuuuucAGuAGucAGAAuTsT | 1172 | AUUCUGACuACUGAAAAuATsT | 1173 | AD-14380 | 35% | 16% |
| AAAucuAAcccuAGuuGuATsT | 1174 | uAcAACuAGGGUuAGAUUUTsT | 1175 | AD-14381 | 44% | 5% |
| cuuuAGAGuAuAcAuuGcuTsT | 1176 | AGcAAUGuAuACUCuAAAGTsT | 1177 | AD-14382 | 28% | 1% |
| AucuGAcuAAuGGcucuGuTsT | 1178 | AcAGAGCcAUuAGUcAGAUTsT | 1179 | AD-14383 | 55% | 11% |
| cAcAAuGAuuuAAGGAcuGTsT | 1180 | cAGUCCUuAAAUcAUUGUGTsT | 1181 | AD-14384 | 48% | 9% |
| ucuuuuucucGAuucAAAuTsT | 1182 | AUUuGAAUCGAGAAAAAGATsT | 1183 | AD-14385 | 36% | 2% |
| cuuuuucucGAuucAAAucTsT | 1184 | GAUUuGAAUCGAGAAAAAATsT | 1185 | AD-14386 | 41% | 7% |
| AuuuucuGcucAcGAuGAGTsT | 1186 | CUcAUCGUGAGcAGAAAAUTsT | 1187 | AD-14387 | 38% | 3% |
| ucucuGcucAcGAuGAGuuTsT | 1188 | AACUcAUCGUGAGcAGAAATsT | 1189 | AD-14388 | 50% | 4% |
| AGAGcuAcAAAAccuAuccTsT | 1190 | GGAuAGGUUUUGuAGCUCUTsT | 1191 | AD-14389 | 98% | 6% |
| GAGccAAAGGuAcAccAcuTsT | 1192 | AGUGGUGuACCUUUGGCUCTsT | 1193 | AD-14390 | 43% | 8% |
| GccAAAGGuAcAccAcuAcTsT | 1194 | GuAGUGGUGuACCUUUGGCTsT | 1195 | AD-14391 | 48% | 4% |
| GAAcuGuAcucuucucAGcTsT | 1196 | GCUGAGAAGAGuAcAGUUCTsT | 1197 | AD-14392 | 44% | 3% |
| AGGuAAAuAucAccAAcAuTsT | 1198 | AUGUUGGUGAuAUUuACCUTsT | 1199 | AD-14393 | 37% | 2% |
| AGcuAcAAAAccuAuccuuTsT | 1200 | AAGGAuAGGUUUUGuAGCUTsT | 1201 | AD-14394 | 114% | 7% |
| uGuGAAAGcAuuuAAuuccTsT | 1202 | GGAAUuAAAUGCUUUcAcATsT | 1203 | AD-14395 | 55% | 4% |
| GcccAcuuuAGAGuAuAcATsT | 1204 | UGuAuACUCuAAAGUGGGCTsT | 1205 | AD-14396 | 49% | 5% |
| uGuGccAcAcuccAAGAccTsT | 1206 | GGUCUUGGAGUGUGGcAcATsT | 1207 | AD-14397 | 71% | 6% |
| AAAcuAAAuuGAucucGuATsT | 1208 | uACGAGAUcAAUUuAGUUUTsT | 1209 | AD-14398 | 81% | 7% |
| uGAucucGuAGAAuuAucuTsT | 1210 | AGAuAAUUCuACGAGAUcATsT | 1211 | AD-14399 | 38% | 4% |
| GcGuGcAGucGGuccuccATsT | 1212 | UGGAGGACCGACUGcACGCTsT | 1213 | AD-14400 | 106% | 8% |
| AAAGuuuAGAGAcAucuGATsT | 1214 | UcAGAUGUCUCuAAACUUUTsT | 1215 | AD-14401 | 47% | 3% |
| cAGAAGGAAuAuGuAcAAATsT | 1216 | UUUGuAcAuAUUCCUUCUGTsT | 1217 | AD-14402 | 31% | 1% |
| cGcccGAGAGuAccAGGGATsT | 1218 | UCCCUGGuACUCUCGGGCGTsT | 1219 | AD-14403 | 105% | 4% |
| cGGAGGAGAuAGAAcGuuuTsT | 1220 | AAACGUUCuAUCUCCUCCGTsT | 1221 | AD-14404 | 3% | 1% |
| AGAuAGAAcGuuuAAAAcGTsT | 1222 | CGUUUuAAACGUUCuAUCUTsT | 1223 | AD-14405 | 15% | 1% |
| GGAAcAGGAAcuucAcAAcTsT | 1224 | GUuGuGAAGUUCCuGUUCCTsT | 1225 | AD-14406 | 44% | 5% |
| GuGAGccAAAGGuAcAccATsT | 1226 | UGGUGuACCUUUGGCUcACTsT | 1227 | AD-14407 | 41% | 4% |
| AuccucccuAGAcuucccuTsT | 1228 | AGGGAAGUCuAGGGAGGAUTsT | 1229 | AD-14408 | 104% | 3% |
| cAcAcuccAAGAccuGuGcTsT | 1230 | GcAcAGGUCUUGGAGUGUGTsT | 1231 | AD-14409 | 67% | 4% |
| AcAGAAGGAAuAuGuAcAATsT | 1232 | UUGuAcAuAUUCCUUCUGUTsT | 1233 | AD-14410 | 22% | 1% |
| uuAGAGAcAucuGAcuuuGTsT | 1234 | cAAAGUcAGAUGUCUCuAATsT | 1235 | AD-14411 | 29% | 3% |
| AAuuGAucucGuAGAAuuATsT | 1236 | uAAUUCuACGAGAUcAAUUTsT | 1237 | AD-14412 | 31% | 4% |

The application's sequence listing, which the Patent Office published only in electronic form, follows.

SEQUENCE LISTING (1236 sequences)

SEQ ID NO: 1 - DNA, 21 bp, artificial sequence
  siRNA cross-reactive to human and mouse Eg5
  5'-terminal nucleic acid is a nucleoside, i.e. base + sugar but lacking 5'-phosphate
  modified_base 1, 6, 8, 9, 11, 12, 13, 15, 16, 17: /mod_base = "2'-O-methyl corresponding base"
  modified_base 21: /mod_base = "5'-thio thymidine"
  modified_base 2, 3, 4, 5, 7, 10, 14, 18, 19: /mod_base = "2'-hydroxy corresponding base"
cgaaguguuguuuguccaatt

SEQ ID NO: 2 - DNA, 21 bp, artificial sequence
  siRNA cross-reactive to human and mouse Eg5
  5'-terminal nucleic acid is a nucleoside, i.e. base + sugar but lacking 5'-phosphate
  modified_base 6, 10, 13: /mod_base = "2'-O-methyl corresponding base"
  modified_base 21: /mod_base = "5'-thio thymidine"
  modified_base 1, 2, 3, 4, 5, 7, 8, 9, 11, 12, 14, 15, 16, 17, 18, 19: /mod_base = "2'-hydroxy corresponding base"
uuggacaaacaacacuucgtt

SEQ ID NO: 3 - DNA, 21 bp, artificial sequence
  siRNA cross-reactive to human and mouse Eg5
  5'-terminal nucleic acid is a nucleoside, i.e. base + sugar but lacking 5'-phosphate
  modified_base 1, 4, 6, 7, 8, 13, 15, 16, 17, 19: /mod_base = "2'-O-methyl corresponding base"
  modified_base 21: /mod_base = "5'-thio thymidine"
  modified_base 2, 3, 5, 9, 10, 11, 12, 14, 18: /mod_base = "2'-hydroxy corresponding base"
ugguguuuggagcaucuactt

SEQ ID NO: 4 - DNA, 21 bp, artificial sequence
  siRNA cross-reactive to human and mouse Eg5
  5'-terminal nucleic acid is a nucleoside, i.e. base + sugar but lacking 5'-phosphate
  modified_base 2, 11, 15, 18: /mod_base = "2'-O-methyl corresponding base"
  modified_base 21: /mod_base = "5'-thio thymidine"
  modified_base 1, 3, 4, 5, 6, 7, 8, 9, 10, 12, 13, 14, 16, 17, 19: /mod_base = "2'-hydroxy corresponding base"
guagaugcuccaaacaccatt

SEQ ID NO: 5 - DNA, 21 bp, artificial sequence
  siRNA cross-reactive to human and mouse Eg5
  5'-terminal nucleic acid is a nucleoside, i.e. base + sugar but lacking 5'-phosphate
  modified_base 1, 2, 3, 7, 8, 11, 12, 17, 18, 19: /mod_base = "2'-O-methyl corresponding base"
  modified_base 21: /mod_base = "5'-thio thymidine"
  modified_base 4, 5, 6, 9, 10, 13, 14, 15, 16: /mod_base = "2'-hydroxy corresponding base"
ucuaaacuaacuagaaucctt

SEQ ID NO: 6 - DNA, 21 bp, artificial sequence
  siRNA cross-reactive to human and mouse Eg5
  5'-terminal nucleic acid is a nucleoside, i.e. base + sugar but lacking 5'-phosphate
  modified_base 7, 11, 16: /mod_base = "2'-O-methyl corresponding base"
  modified_base 21: /mod_base = "5'-thio thymidine"
  modified_base 1, 2, 3, 4, 5, 6, 8, 9, 10, 12, 13, 14, 15, 17, 18, 19: /mod_base = "2'-hydroxy corresponding base"
ggauucuaguuaguuuagatt

SEQ ID NO: 7 - DNA, 21 bp, artificial sequence
  siRNA cross-reactive to human and mouse Eg5
  5'-terminal nucleic acid is a nucleoside, i.e. base + sugar but lacking 5'-phosphate
  modified_base 1, 2, 3, 5, 6, 12, 13, 14, 18, 19: /mod_base = "2'-O-methyl corresponding base"
  modified_base 21: /mod_base = "5'-thio thymidine"
  modified_base 4, 7, 8, 9, 10, 11, 15, 16, 17: /mod_base = "2'-hydroxy corresponding base"
cuuaucgagaaucuaaacutt

SEQ ID NO: 8 - DNA, 21 bp, artificial sequence
  siRNA cross-reactive to human and mouse Eg5
  5'-terminal nucleic acid is a nucleoside, i.e. base + sugar but lacking 5'-phosphate
  modified_base 5, 16: /mod_base = "2'-O-methyl corresponding base"
  modified_base 21: /mod_base = "5'-thio thymidine"
  modified_base 1, 2, 3, 4, 6, 7, 8, 9, 10, 11, 12, 13, 14, 15, 17, 18, 19: /mod_base = "2'-hydroxy corresponding base"
aguuuagauucucgauaagtt

SEQ ID NO: 9 - DNA, 21 bp, artificial sequence
  siRNA cross-reactive to human and mouse Eg5
  5'-terminal nucleic acid is a nucleoside, i.e. base + sugar but lacking 5'-phosphate
  modified_base 1, 2, 5, 7, 8, 9, 11, 12, 17, 19: /mod_base = "2'-O-methyl corresponding base"
  modified_base 21: /mod_base = "5'-thio thymidine"
  modified_base 3, 4, 6, 10, 13, 14, 15, 16, 18: /mod_base = "2'-hydroxy corresponding base"
uugauguuuaccgaagugutt

SEQ ID NO: 10 - DNA, 21 bp, artificial sequence
  siRNA cross-reactive to human and mouse Eg5
  5'-terminal nucleic acid is a nucleoside, i.e. base + sugar but lacking 5'-phosphate
  modified_base 2, 10, 14, 17: /mod_base = "2'-O-methyl corresponding base"
  modified_base 21: /mod_base = "5'-thio thymidine"
  modified_base 1, 3, 4, 5, 6, 7, 8, 9, 11, 12, 13, 15, 16, 18, 19: /mod_base = "2'-hydroxy corresponding base"
acacuucgguaaacaucaatt

SEQ ID NO: 11 - DNA, 21 bp, artificial sequence
  siRNA cross-reactive to human and mouse Eg5
  5'-terminal nucleic acid is a nucleoside, i.e. base + sugar but lacking 5'-phosphate
  modified_base 2, 7, 9, 13, 14, 16, 17, 18: /mod_base = "2'-O-methyl corresponding base"
  modified_base 21: /mod_base = "5'-thio thymidine"
  modified_base 1, 3, 4, 5, 6, 8, 10, 11, 12, 15, 19: /mod_base = "2'-hydroxy corresponding base"
gugagaugcagaccauuuatt

SEQ ID NO: 12 - DNA, 21 bp, artificial sequence
  siRNA cross-reactive to human and mouse Eg5
  5'-terminal nucleic acid is a nucleoside, i.e. base + sugar but lacking 5'-phosphate
  modified_base 1, 12, 17: /mod_base = "2'-O-methyl corresponding base"
  modified_base 21: /mod_base = "5'-thio thymidine"
  modified_base 2, 3, 4, 5, 6, 7, 8, 9, 10, 11, 13, 14, 15, 16, 18, 19: /mod_base = "2'-hydroxy corresponding base"
uaaauggucugcaucucactt

SEQ ID NO: 13 - DNA, 21 bp, artificial sequence
  siRNA cross-reactive to human and mouse Eg5
  5'-terminal nucleic acid is a nucleoside, i.e. base + sugar but lacking 5'-phosphate
  modified_base 1, 2, 3, 7, 9, 11, 12, 17, 19: /mod_base = "2'-O-methyl corresponding base"
  modified_base 21: /mod_base = "5'-thio thymidine"
  modified_base 4, 5, 6, 8, 10, 13, 14, 15, 16, 18: /mod_base = "2'-hydroxy corresponding base"
ucugaguacauuggaauautt

SEQ ID NO: 14 - DNA, 21 bp, artificial sequence
  siRNA cross-reactive to human and mouse Eg5
  5'-terminal nucleic acid is a nucleoside, i.e. base + sugar but lacking 5'-phosphate
  modified_base 2, 7, 12, 16: /mod_base = "2'-O-methyl corresponding base"
  modified_base 21: /mod_base = "5'-thio thymidine"
  modified_base 1, 3, 4, 5, 6, 8, 9, 10, 11, 13, 14, 15, 17, 18, 19: /mod_base = "2'-hydroxy corresponding base"
auauuccaauguacucagatt

SEQ ID NO: 15 - DNA, 21 bp, artificial sequence
  siRNA cross-reactive to human and mouse Eg5
  5'-terminal nucleic acid is a nucleoside, i.e. base + sugar but lacking 5'-phosphate
  modified_base 5, 7, 8, 10, 11, 12, 14, 15, 16, 19: /mod_base = "2'-O-methyl corresponding base"
  modified_base 21: /mod_base = "5'-thio thymidine"
  modified_base 1, 2, 3, 4, 6, 9, 13, 17, 18: /mod_base = "2'-hydroxy corresponding base"
gaaguguuguuuguccaautt

SEQ ID NO: 16 - DNA, 21 bp, artificial sequence
  siRNA cross-reactive to human and mouse Eg5
  5'-terminal nucleic acid is a nucleoside, i.e. base + sugar but lacking 5'-phosphate
  modified_base 7, 11, 14: /mod_base = "2'-O-methyl corresponding base"
  modified_base 21: /mod_base = "5'-thio thymidine"
  modified_base 1, 2, 3, 4, 5, 6, 8, 9, 10, 12, 13, 15, 16, 17, 18, 19: /mod_base = "2'-hydroxy corresponding base"
auuggacaaacaacacuuctt

SEQ ID NO: 17 - DNA, 21 bp, artificial sequence
  siRNA cross-reactive to human and mouse Eg5
  5'-terminal nucleic acid is a nucleoside, i.e. base + sugar but lacking 5'-phosphate
  modified_base 1, 2, 4, 5, 7, 11, 12, 14, 17, 18: /mod_base = "2'-O-methyl corresponding base"
  modified_base 21: /mod_base = "5'-thio thymidine"
  modified_base 3, 6, 8, 9, 10, 13, 15, 16, 19: /mod_base = "2'-hydroxy corresponding base"
uuauuaugggcuauaauugtt

SEQ ID NO: 18 - DNA, 21 bp, artificial sequence
  siRNA cross-reactive to human and mouse Eg5
  5'-terminal nucleic acid is a nucleoside, i.e. base + sugar but lacking 5'-phosphate
  modified_base 1, 5, 7, 12, 14, 17: /mod_base = "2'-O-methyl corresponding base"
  modified_base 21: /mod_base = "5'-thio thymidine"
  modified_base 2, 3, 4, 6, 8, 9, 10, 11, 13, 15, 16, 18, 19: /mod_base = "2'-hydroxy corresponding base"
caauuauagcccauaauaatt

SEQ ID NO: 19 - DNA, 21 bp, artificial sequence
  siRNA cross-reactive to human and mouse Eg5
  5'-terminal nucleic acid is a nucleoside, i.e. base + sugar but lacking 5'-phosphate
  modified_base 5, 12, 13, 15, 16, 17: /mod_base = "2'-O-methyl corresponding base"
  modified_base 21: /mod_base = "5'-thio thymidine"
  modified_base 1, 2, 3, 4, 6, 7, 8, 9, 10, 11, 14, 18, 19: /mod_base = "2'-hydroxy corresponding base"
aaggugaaaggucaccuaatt

SEQ ID NO: 20 - DNA, 21 bp, artificial sequence
  siRNA cross-reactive to human and mouse Eg5
  5'-terminal nucleic acid is a nucleoside, i.e. base + sugar but lacking 5'-phosphate
  modified_base 2, 14: /mod_base = "2'-O-methyl corresponding base"
  modified_base 21: /mod_base = "5'-thio thymidine"
  modified_base 1, 3, 4, 5, 6, 7, 8, 9, 10, 11, 12, 13, 15, 16, 17, 18, 19: /mod_base = "2'-hydroxy corresponding base"
uuaggugaccuuucaccuutt

SEQ ID NO: 21 - DNA, 21 bp, artificial sequence
  siRNA cross-reactive to human and mouse Eg5
  5'-terminal nucleic acid is a nucleoside, i.e. base + sugar but lacking 5'-phosphate
  modified_base 1, 2, 4, 7, 14: /mod_base = "2'-O-methyl corresponding base"
  modified_base 21: /mod_base = "5'-thio thymidine"
  modified_base 3, 5, 6, 8, 9, 10, 11, 12, 13, 15, 16, 17, 18, 19: /mod_base = "2'-hydroxy corresponding base"
uuacaauggaaggugaaagtt

SEQ ID NO: 22 - DNA, 21 bp, artificial sequence
  siRNA cross-reactive to human and mouse Eg5
  5'-terminal nucleic acid is a nucleoside, i.e. base + sugar but lacking 5'-phosphate
  modified_base 5, 12, 17: /mod_base = "2'-O-methyl corresponding base"
  modified_base 21: /mod_base = "5'-thio thymidine"
  modified_base 1, 2, 3, 4, 6, 7, 8, 9, 10, 11, 13, 14, 15, 16, 18, 19: /mod_base = "2'-hydroxy corresponding base"
cuuucaccuuccauuguaatt

SEQ ID NO: 23 - DNA, 21 bp, artificial sequence
  siRNA cross-reactive to human and mouse Eg5
  5'-terminal nucleic acid is a nucleoside, i.e. base + sugar but lacking 5'-phosphate
  modified_base 4, 11, 12, 14, 15, 16, 19: /mod_base = "2'-O-methyl corresponding base"
  modified_base 21: /mod_base = "5'-thio thymidine"
  modified_base 1, 2, 3, 5, 6, 7, 8, 9, 10, 13, 17, 18: /mod_base = "2'-hydroxy corresponding base"
aggugaaaggucaccuaautt

SEQ ID NO: 24 - DNA, 21 bp, artificial sequence
  siRNA cross-reactive to human and mouse Eg5
  5'-terminal nucleic acid is a nucleoside, i.e. base + sugar but lacking 5'-phosphate
  modified_base 3, 15: /mod_base = "2'-O-methyl corresponding base"
  modified_base 21: /mod_base = "5'-thio thymidine"
  modified_base 1, 2, 4, 5, 6, 7, 8, 9, 10, 11, 12, 13, 14, 16, 17, 18, 19: /mod_base = "2'-hydroxy corresponding base"
auuaggugaccuuucaccutt

SEQ ID NO: 25 - DNA, 21 bp, artificial sequence
  siRNA cross-reactive to human and mouse Eg5
  5'-terminal nucleic acid is a nucleoside, i.e. base + sugar but lacking 5'-phosphate
  modified_base 3, 10, 11, 13, 14, 15, 18: /mod_base = "2'-O-methyl corresponding base"
  modified_base 21: /mod_base = "5'-thio thymidine"
  modified_base 1, 2, 4, 5, 6, 7, 8, 9, 12, 16, 17, 19: /mod_base = "2'-hydroxy corresponding base"
ggugaaaggucaccuaaugtt

SEQ ID NO: 26 - DNA, 21 bp, artificial sequence
  siRNA cross-reactive to human and mouse Eg5
  5'-terminal nucleic acid is a nucleoside, i.e. base + sugar but lacking 5'-phosphate
  modified_base 1, 4, 16: /mod_base = "2'-O-methyl corresponding base"
  modified_base 21: /mod_base = "5'-thio thymidine"
  modified_base 2, 3, 5, 6, 7, 8, 9, 10, 11, 12, 13, 14, 15, 17, 18, 19: /mod_base = "2'-hydroxy corresponding base"
cauuaggugaccuuucacctt

SEQ ID NO: 27 - DNA, 21 bp, artificial sequence
  siRNA cross-reactive to human and mouse Eg5
  5'-terminal nucleic acid is a nucleoside, i.e. base + sugar but lacking 5'-phosphate
  modified_base 1, 2, 3, 4, 6, 7, 13, 14, 15, 19: /mod_base = "2'-O-methyl corresponding base"
  modified_base 21: /mod_base = "5'-thio thymidine"
  modified_base 5, 8, 9, 10, 11, 12, 16, 17, 18: /mod_base = "2'-hydroxy corresponding base"
ccuuaucgagaaucuaaactt

SEQ ID NO: 28 - DNA, 21 bp, artificial sequence
  siRNA cross-reactive to human and mouse Eg5
  5'-terminal nucleic acid is a nucleoside, i.e. base + sugar but lacking 5'-phosphate
  modified_base 4, 15: /mod_base = "2'-O-methyl corresponding base"
  modified_base 21: /mod_base = "5'-thio thymidine"
  modified_base 1, 2, 3, 5, 6, 7, 8, 9, 10, 11, 12, 13, 14, 16, 17, 18, 19: /mod_base = "2'-hydroxy corresponding base"
guuuagauucucgauaaggtt

SEQ ID NO: 29 - DNA, 21 bp, artificial sequence
  siRNA cross-reactive to human and mouse Eg5
  5'-terminal nucleic acid is a nucleoside, i.e. base + sugar but lacking 5'-phosphate
  modified_base 1, 2, 3, 4, 5, 7, 8, 15, 17, 19: /mod_base = "2'-O-methyl corresponding base"
  modified_base 21: /mod_base = "5'-thio thymidine"
  modified_base 6, 9, 10, 11, 12, 13, 14, 16, 18: /mod_base = "2'-hydroxy corresponding base"
cucuuauuaaggaguauactt

SEQ ID NO: 30 - DNA, 21 bp, artificial sequence
  siRNA cross-reactive to human and mouse Eg5
  5'-terminal nucleic acid is a nucleoside, i.e. base + sugar but lacking 5'-phosphate
  modified_base 2, 4, 11, 14: /mod_base = "2'-O-methyl corresponding base"
  modified_base 21: /mod_base = "5'-thio thymidine"
  modified_base 1, 3, 5, 6, 7, 8, 9, 10, 12, 13, 15, 16, 17, 18, 19: /mod_base = "2'-hydroxy corresponding base"
guauacuccuuaauaagagtt

SEQ ID NO: 31 - DNA, 21 bp, artificial sequence
  siRNA cross-reactive to human and mouse Eg5
  5'-terminal nucleic acid is a nucleoside, i.e. base + sugar but lacking 5'-phosphate
  modified_base 7, 8, 9, 10, 12, 14, 15, 16, 17: /mod_base = "2'-O-methyl corresponding base"
  modified_base 21: /mod_base = "5'-thio thymidine"
  modified_base 1, 2, 3, 4, 5, 6, 11, 13, 18, 19: /mod_base = "2'-hydroxy corresponding base"
gagagauucugugcuuuggtt

SEQ ID NO: 32 - DNA, 21 bp, artificial sequence
  siRNA cross-reactive to human and mouse Eg5
  5'-terminal nucleic acid is a nucleoside, i.e. base + sugar but lacking 5'-phosphate
  modified_base 2, 7, 9: /mod_base = "2'-O-methyl corresponding base"
  modified_base 21: /mod_base = "5'-thio thymidine"
  modified_base 1, 3, 4, 5, 6, 8, 10, 11, 12, 13, 14, 15, 16, 17, 18, 19: /mod_base = "2'-hydroxy corresponding base"
ccaaagcacagaaucucuctt

SEQ ID NO: 33 - DNA, 21 bp, artificial sequence
  siRNA cross-reactive to human and mouse Eg5
  5'-terminal nucleic acid is a nucleoside, i.e. base + sugar but lacking 5'-phosphate
  modified_base 2, 3, 4, 8, 9, 12, 13, 18, 19: /mod_base = "2'-O-methyl corresponding base"
  modified_base 21: /mod_base = "5'-thio thymidine"
  modified_base 1, 5, 6, 7, 10, 11, 14, 15, 16, 17: /mod_base = "2'-hydroxy corresponding base"
aucuaaacuaacuagaauctt

SEQ ID NO: 34 - DNA, 21 bp, artificial sequence
  siRNA cross-reactive to human and mouse Eg5
  5'-terminal nucleic acid is a nucleoside, i.e. base + sugar but lacking 5'-phosphate
  modified_base 6, 10, 15: /mod_base = "2'-O-methyl corresponding base"
  modified_base 21: /mod_base = "5'-thio thymidine"
  modified_base 1, 2, 3, 4, 5, 7, 8, 9, 11, 12, 13, 14, 16, 17, 18, 19: /mod_base = "2'-hydroxy corresponding base"
gauucuaguuaguuuagautt

SEQ ID NO: 35 - DNA, 21 bp, artificial sequence
  siRNA cross-reactive to human and mouse Eg5
  5'-terminal nucleic acid is a nucleoside, i.e. base + sugar but lacking 5'-phosphate
  modified_base 1, 2, 4, 5, 13, 14, 15, 16, 17, 19: /mod_base = "2'-O-methyl corresponding base"
  modified_base 21: /mod_base = "5'-thio thymidine"
  modified_base 3, 6, 7, 8, 9, 10, 11, 12, 18: /mod_base = "2'-hydroxy corresponding base"
ucaccaaaaaagcucuuautt

SEQ ID NO: 36 - DNA, 21 bp, artificial sequence
  siRNA cross-reactive to human and mouse Eg5
  5'-terminal nucleic acid is a nucleoside, i.e. base + sugar but lacking 5'-phosphate
  modified_base 2: /mod_base = "2'-O-methyl corresponding base"
  modified_base 21: /mod_base = "5'-thio thymidine"
  modified_base 1, 3, 4, 5, 6, 7, 8, 9, 10, 11, 12, 13, 14, 15, 16, 17, 18, 19: /mod_base = "2'-hydroxy corresponding base"
auaagagcuuuuuuggugatt

SEQ ID NO: 37 - DNA, 21 bp, artificial sequence
  siRNA cross-reactive to human and mouse Eg5
  5'-terminal nucleic acid is a nucleoside, i.e. base + sugar but lacking 5'-phosphate
  modified_base 4, 5, 6, 7, 8, 9, 12, 13, 14, 15, 16, 17, 18: /mod_base = "2'-O-methyl corresponding base"
  modified_base 21: /mod_base = "5'-thio thymidine"
  modified_base 1, 2, 3, 10, 11, 19: /mod_base = "2'-hydroxy corresponding base"
gagcuuuuugaucuucuuatt

SEQ ID NO: 38 - DNA, 21 bp, artificial sequence
  siRNA cross-reactive to human and mouse Eg5
  5'-terminal nucleic acid is a nucleoside, i.e. base + sugar but lacking 5'-phosphate
  modified_base 1, 10: /mod_base = "2'-O-methyl corresponding base"
  modified_base 21: /mod_base = "5'-thio thymidine"
  modified_base 2, 3, 4, 5, 6, 7, 8, 9, 11, 12, 13, 14, 15, 16, 17, 18, 19: /mod_base = "2'-hydroxy corresponding base"
uaagaagaucaaaaagcuctt

SEQ ID NO: 39 - DNA, 21 bp, artificial sequence
  siRNA cross-reactive to human and mouse Eg5
  5'-terminal nucleic acid is a nucleoside, i.e. base + sugar but lacking 5'-phosphate
  modified_base 1, 3, 5, 11, 13, 14, 15, 17: /mod_base = "2'-O-methyl corresponding base"
  modified_base 21: /mod_base = "5'-thio thymidine"
  modified_base 2, 4, 6, 7, 8, 9, 10, 12, 16, 18, 19: /mod_base = "2'-hydroxy corresponding base"
cguacaagaacaucuauaatt

SEQ ID NO: 40 - DNA, 21 bp, artificial sequence
  siRNA cross-reactive to human and mouse Eg5
  5'-terminal nucleic acid is a nucleoside, i.e. base + sugar but lacking 5'-phosphate
  modified_base 2, 4, 16: /mod_base = "2'-O-methyl corresponding base"
  modified_base 21: /mod_base = "5'-thio thymidine"
  modified_base 1, 3, 5, 6, 7, 8, 9, 10, 11, 12, 13, 14, 15, 17, 18, 19: /mod_base = "2'-hydroxy corresponding base"
uuauagauguucuuguacgtt

SEQ ID NO: 41 - DNA, 21 bp, artificial sequence
  siRNA cross-reactive to human and mouse Eg5
  5'-terminal nucleic acid is a nucleoside, i.e. base + sugar but lacking 5'-phosphate
  modified_base 2, 3, 6, 8, 9, 10, 12, 13, 18: /mod_base = "2'-O-methyl corresponding base"
  modified_base 21: /mod_base = "5'-thio thymidine"
  modified_base 1, 4, 5, 7, 11, 14, 15, 16, 17, 19: /mod_base = "2'-hydroxy corresponding base"
auugauguuuaccgaagugtt

SEQ ID NO: 42 - DNA, 21 bp, artificial sequence
  siRNA cross-reactive to human and mouse Eg5
  5'-terminal nucleic acid is a nucleoside, i.e. base + sugar but lacking 5'-phosphate
  modified_base 1, 9, 13, 16: /mod_base = "2'-O-methyl corresponding base"
  modified_base 21: /mod_base = "5'-thio thymidine"
  modified_base 2, 3, 4, 5, 6, 7, 8, 10, 11, 12, 14, 15, 17, 18, 19: /mod_base = "2'-hydroxy corresponding base"
cacuucgguaaacaucaautt

SEQ ID NO: 43 - DNA, 21 bp, artificial sequence
  siRNA cross-reactive to human and mouse Eg5
  5'-terminal nucleic acid is a nucleoside, i.e. base + sugar but lacking 5'-phosphate
  modified_base 1, 2, 6, 7, 10, 11, 16, 17, 18, 19: /mod_base = "2'-O-methyl corresponding base"
  modified_base 21: /mod_base = "5'-thio thymidine"
  modified_base 3, 4, 5, 8, 9, 12, 13, 14, 15: /mod_base = "2'-hydroxy corresponding base"
cuaaacuaacuagaauccutt

SEQ ID NO: 44 - DNA, 21 bp, artificial sequence
  siRNA cross-reactive to human and mouse Eg5
  5'-terminal nucleic acid is a nucleoside, i.e. base + sugar but lacking 5'-phosphate
  modified_base 8, 12, 17: /mod_base = "2'-O-methyl corresponding base"
  modified_base 21: /mod_base = "5'-thio thymidine"
  modified_base 1, 2, 3, 4, 5, 6, 7, 9, 10, 11, 13, 14, 15, 16, 18, 19: /mod_base = "2'-hydroxy corresponding base"
aggauucuaguuaguuuagtt

SEQ ID NO: 45 - DNA, 21 bp, artificial sequence
  siRNA cross-reactive to human and mouse Eg5
  5'-terminal nucleic acid is a nucleoside, i.e. base + sugar but lacking 5'-phosphate
  modified_base 2, 3, 8, 10, 11, 13, 14, 15, 17, 18, 19: /mod_base = "2'-O-methyl corresponding base"
  modified_base 21: /mod_base = "5'-thio thymidine"
  modified_base 1, 4, 5, 6, 7, 9, 12, 16: /mod_base = "2'-hydroxy corresponding base"
accgaaguguuguuugucctt

SEQ ID NO: 46 - DNA, 21 bp, artificial sequence
  siRNA cross-reactive to human and mouse Eg5
  5'-terminal nucleic acid is a nucleoside, i.e. base + sugar but lacking 5'-phosphate
  modified_base 4, 8, 11: /mod_base = "2'-O-methyl corresponding base"
  modified_base 21: /mod_base = "5'-thio thymidine"
  modified_base 1, 2, 3, 5, 6, 7, 9, 10, 12, 13, 14, 15, 16, 17, 18, 19: /mod_base = "2'-hydroxy corresponding base"
ggacaaacaacacuucggutt

SEQ ID NO: 47 - DNA, 21 bp, artificial sequence
  siRNA cross-reactive to human and mouse Eg5
  5'-terminal nucleic acid is a nucleoside, i.e. base + sugar but lacking 5'-phosphate
  modified_base 1, 4, 7, 12, 14, 18, 19: /mod_base = "2'-O-methyl corresponding base"
  modified_base 21: /mod_base = "5'-thio thymidine"
  modified_base 2, 3, 5, 6, 8, 9, 10, 11, 13, 15, 16, 17: /mod_base = "2'-hydroxy corresponding base"
ugguggugagaugcagacctt

SEQ ID NO: 48 - DNA, 21 bp, artificial sequence
  siRNA cross-reactive to human and mouse Eg5
  5'-terminal nucleic acid is a nucleoside, i.e. base + sugar but lacking 5'-phosphate
  modified_base 7, 12, 15, 18: /mod_base = "2'-O-methyl corresponding base"
  modified_base 21: /mod_base = "5'-thio thymidine"
  modified_base 1, 2, 3, 4, 5, 6, 8, 9, 10, 11, 13, 14, 16, 17, 19: /mod_base = "2'-hydroxy corresponding base"
ggucugcaucucaccaccatt

SEQ ID NO: 49 - DNA, 21 bp, artificial sequence
  siRNA cross-reactive to human and rhesus monkey Eg5
  5'-terminal nucleic acid is a nucleoside, i.e. base + sugar but lacking 5'-phosphate
  modified_base 1, 3, 5, 6, 7, 8, 11, 12, 14, 15, 16, 17, 18: /mod_base = "2'-O-methyl corresponding base"
  modified_base 21: /mod_base = "5'-thio thymidine"
  modified_base 2, 4, 9, 10, 13, 19: /mod_base = "2'-hydroxy corresponding base"
cauacucuagucguucccatt

SEQ ID NO: 50 - DNA, 21 bp, artificial sequence
  siRNA cross-reactive to human and rhesus monkey Eg5
  5'-terminal nucleic acid is a nucleoside, i.e. base + sugar but lacking 5'-phosphate
  modified_base 11, 16: /mod_base = "2'-O-methyl corresponding base"
  modified_base 21: /mod_base = "5'-thio thymidine"
  modified_base 1, 2, 3, 4, 5, 6, 7, 8, 9, 10, 12, 13, 14, 15, 17, 18, 19: /mod_base = "2'-hydroxy corresponding base"
ugggaacgacuagaguaugtt

SEQ ID NO: 51 - DNA, 21 bp, artificial sequence
  siRNA cross-reactive to human and rhesus monkey Eg5
  5'-terminal nucleic acid is a nucleoside, i.e. base + sugar but lacking 5'-phosphate
  modified_base 3, 5, 6, 7, 9, 10, 11, 14, 17: /mod_base = "2'-O-methyl corresponding base"
  modified_base 21: /mod_base = "5'-thio thymidine"
  modified_base 1, 2, 4, 8, 12, 13, 15, 16, 18, 19: /mod_base = "2'-hydroxy corresponding base"
agcgcccauucaauaguagtt

SEQ ID NO: 52 - DNA, 21 bp, artificial sequence
  siRNA cross-reactive to human and rhesus monkey Eg5
  5'-terminal nucleic acid is a nucleoside, i.e. base + sugar but lacking 5'-phosphate
  modified_base 2, 5: /mod_base = "2'-O-methyl corresponding base"
  modified_base 21: /mod_base = "5'-thio thymidine"
  modified_base 1, 3, 4, 6, 7, 8, 9, 10, 11, 12, 13, 14, 15, 16, 17, 18, 19: /mod_base = "2'-hydroxy corresponding base"
cuacuauugaaugggcgcutt

SEQ ID NO: 53 - DNA, 21 bp, artificial sequence
  siRNA cross-reactive to human and rhesus monkey Eg5
  5'-terminal nucleic acid is a nucleoside, i.e. base + sugar but lacking 5'-phosphate
  modified_base 7, 8, 11, 13, 14, 15, 17, 18, 19: /mod_base = "2'-O-methyl corresponding base"
  modified_base 21: /mod_base = "5'-thio thymidine"
  modified_base 1, 2, 3, 4, 5, 6, 9, 10, 12, 16: /mod_base = "2'-hydroxy corresponding base"
ggaaagcuagcgcccauuctt

SEQ ID NO: 54 - DNA, 21 bp, artificial sequence
  siRNA cross-reactive to human and rhesus monkey Eg5
  5'-terminal nucleic acid is a nucleoside, i.e. base + sugar but lacking 5'-phosphate
  modified_base 11: /mod_base = "2'-O-methyl corresponding base"
  modified_base 21: /mod_base = "5'-thio thymidine"
  modified_base 1, 2, 3, 4, 5, 6, 7, 8, 9, 10, 12, 13, 14, 15, 16, 17, 18, 19: /mod_base = "2'-hydroxy corresponding base"
gaaugggcgcuagcuuucctt

SEQ ID NO: 55 - DNA, 21 bp, artificial sequence
  siRNA cross-reactive to human and rhesus monkey Eg5
  5'-terminal nucleic acid is a nucleoside, i.e. base + sugar but lacking 5'-phosphate
  modified_base 6, 7, 10, 12, 13, 14, 16, 17, 18: /mod_base = "2'-O-methyl corresponding base"
  modified_base 21: /mod_base = "5'-thio thymidine"
  modified_base 1, 2, 3, 4, 5, 8, 9, 11, 15, 19: /mod_base = "2'-hydroxy corresponding base"
gaaagcuagcgcccauucatt

SEQ ID NO: 56 - DNA, 21 bp, artificial sequence
  siRNA cross-reactive to human and rhesus monkey Eg5
  5'-terminal nucleic acid is a nucleoside, i.e. base + sugar but lacking 5'-phosphate
  modified_base 12: /mod_base = "2'-O-methyl corresponding base"
  modified_base 21: /mod_base = "5'-thio thymidine"
  modified_base 1, 2, 3, 4, 5, 6, 7, 8, 9, 10, 11, 13, 14, 15, 16, 17, 18, 19: /mod_base = "2'-hydroxy corresponding base"
ugaaugggcgcuagcuuuctt

SEQ ID NO: 57 - DNA, 21 bp, artificial sequence
  siRNA cross-reactive to human and rhesus monkey Eg5
  5'-terminal nucleic acid is a nucleoside, i.e. base + sugar but lacking 5'-phosphate
  modified_base 6, 7, 9, 12, 13, 16: /mod_base = "2'-O-methyl corresponding base"
  modified_base 21: /mod_base = "5'-thio thymidine"
  modified_base 1, 2, 3, 4, 5, 8, 10, 11, 14, 15, 17, 18, 19: /mod_base = "2'-hydroxy corresponding base"
agaaacuacgauugauggatt

SEQ ID NO: 58 - DNA, 21 bp, artificial sequence
  siRNA cross-reactive to human and rhesus monkey Eg5
  5'-terminal nucleic acid is a nucleoside, i.e. base + sugar but lacking 5'-phosphate
  modified_base 3, 6, 12: /mod_base = "2'-O-methyl corresponding base"
  modified_base 21: /mod_base = "5'-thio thymidine"
  modified_base 1, 2, 4, 5, 7, 8, 9, 10, 11, 13, 14, 15, 16, 17, 18, 19: /mod_base = "2'-hydroxy corresponding base"
uccaucaaucguaguuucutt

SEQ ID NO: 59 - DNA, 21 bp, artificial sequence
  siRNA cross-reactive to human and rhesus monkey Eg5
  5'-terminal nucleic acid is a nucleoside, i.e. base + sugar but lacking 5'-phosphate
  modified_base 1, 3, 4, 5, 6, 7, 8, 10, 11, 17, 18, 19: /mod_base = "2'-O-methyl corresponding base"
  modified_base 21: /mod_base = "5'-thio thymidine"
  modified_base 2, 9, 12, 13, 14, 15, 16: /mod_base = "2'-hydroxy corresponding base"
uguuccuuaucgagaaucutt

SEQ ID NO: 60 - DNA, 21 bp, artificial sequence
  siRNA cross-reactive to human and rhesus monkey Eg5
  5'-terminal nucleic acid is a nucleoside, i.e. base + sugar but lacking 5'-phosphate
  modified_base 11, 18: /mod_base = "2'-O-methyl corresponding base"
  modified_base 21: /mod_base = "5'-thio thymidine"
  modified_base 1, 2, 3, 4, 5, 6, 7, 8, 9, 10, 12, 13, 14, 15, 16, 17, 19: /mod_base = "2'-hydroxy corresponding base"
agauucucgauaaggaacatt

SEQ ID NO: 61 - DNA, 21 bp, artificial sequence
  siRNA cross-reactive to human and rhesus monkey Eg5
  5'-terminal nucleic acid is a nucleoside, i.e. base + sugar but lacking 5'-phosphate
  modified_base 1, 5, 6, 8, 9, 10, 11, 12, 14, 18, 19: /mod_base = "2'-O-methyl corresponding base"
  modified_base 21: /mod_base = "5'-thio thymidine"
  modified_base 2, 3, 4, 7, 13, 15, 16, 17: /mod_base = "2'-hydroxy corresponding base"
cagauuaccucugcgagcctt

SEQ ID NO: 62 - DNA, 21 bp, artificial sequence
  siRNA cross-reactive to human and rhesus monkey Eg5
  5'-terminal nucleic acid is a nucleoside, i.e. base + sugar but lacking 5'-phosphate
  modified_base 7, 13: /mod_base = "2'-O-methyl corresponding base"
  modified_base 21: /mod_base = "5'-thio thymidine"
  modified_base 1, 2, 3, 4, 5, 6, 8, 9, 10, 11, 12, 14, 15, 16, 17, 18, 19: /mod_base = "2'-hydroxy corresponding base"
ggcucgcagagguaaucugtt

SEQ ID NO: 63 - DNA, 21 bp, artificial sequence
  siRNA cross-reactive to human and rhesus monkey Eg5
  5'-terminal nucleic acid is a nucleoside, i.e. base + sugar but lacking 5'-phosphate
  modified_base 2, 4, 5, 6, 8, 9, 10, 13, 16: /mod_base = "2'-O-methyl corresponding base"
  modified_base 21: /mod_base = "5'-thio thymidine"
  modified_base 1, 3, 7, 11, 12, 14, 15, 17, 18, 19: /mod_base = "2'-hydroxy corresponding base"
gcgcccauucaauaguagatt

SEQ ID NO: 64 - DNA, 21 bp, artificial sequence
  siRNA cross-reactive to human and rhesus monkey Eg5
  5'-terminal nucleic acid is a nucleoside, i.e. base + sugar but lacking 5'-phosphate
  modified_base 3, 6: /mod_base = "2'-O-methyl corresponding base"
  modified_base 21: /mod_base = "5'-thio thymidine"
  modified_base 1, 2, 4, 5, 7, 8, 9, 10, 11, 12, 13, 14, 15, 16, 17, 18, 19: /mod_base = "2'-hydroxy corresponding base"
ucuacuauugaaugggcgctt

SEQ ID NO: 65 - DNA, 21 bp, artificial sequence
  siRNA cross-reactive to human and rhesus monkey Eg5
  5'-terminal nucleic acid is a nucleoside, i.e. base + sugar but lacking 5'-phosphate
  modified_base 1, 2, 4, 6, 7, 9, 10, 11, 12, 13, 15, 17, 19: /mod_base = "2'-O-methyl corresponding base"
  modified_base 21: /mod_base = "5'-thio thymidine"
  modified_base 3, 5, 8, 14, 16, 18: /mod_base = "2'-hydroxy corresponding base"
uugcacuaucuuugcguautt

SEQ ID NO: 66 - DNA, 21 bp, artificial sequence
  siRNA cross-reactive to human and rhesus monkey Eg5
  5'-terminal nucleic acid is a nucleoside, i.e. base + sugar but lacking 5'-phosphate
  modified_base 2, 6, 12, 17: /mod_base = "2'-O-methyl corresponding base"
  modified_base 21: /mod_base = "5'-thio thymidine"
  modified_base 1, 3, 4, 5, 7, 8, 9, 10, 11, 13, 14, 15, 16, 18, 19: /mod_base = "2'-hydroxy corresponding base"
auacgcaaagauagugcaatt

SEQ ID NO: 67 - DNA, 21 bp, artificial sequence
  siRNA cross-reactive to human and rhesus monkey Eg5
  5'-terminal nucleic acid is a nucleoside, i.e. base + sugar but lacking 5'-phosphate
  modified_base 1, 6, 13, 14, 17, 19: /mod_base = "2'-O-methyl corresponding base"
  modified_base 21: /mod_base = "5'-thio thymidine"
  modified_base 2, 3, 4, 5, 7, 8, 9, 10, 11, 12, 15, 16, 18: /mod_base = "2'-hydroxy corresponding base"
cagagcggaaagcuagcgctt

SEQ ID NO: 68 - DNA, 21 bp, artificial sequence
  siRNA cross-reactive to human and rhesus monkey Eg5
  5'-terminal nucleic acid is a nucleoside, i.e. base + sugar but lacking 5'-phosphate
  modified_base 5: /mod_base = "2'-O-methyl corresponding base"
  modified_base 21: /mod_base = "5'-thio thymidine"
  modified_base 1, 2, 3, 4, 6, 7, 8, 9, 10, 11, 12, 13, 14, 15, 16, 17, 18, 19: /mod_base = "2'-hydroxy corresponding base"
gcgcuagcuuuccgcucugtt

SEQ ID NO: 69 - DNA, 21 bp, artificial sequence
  siRNA cross-reactive to human and rhesus monkey Eg5
  5'-terminal nucleic acid is a nucleoside, i.e. base + sugar but lacking 5'-phosphate
  modified_base 4, 5, 6, 7, 9, 10, 11, 14, 17, 18, 19: /mod_base = "2'-O-methyl corresponding base"
  modified_base 21: /mod_base = "5'-thio thymidine"
  modified_base 1, 2, 3, 8, 12, 13, 15, 16: /mod_base = "2'-hydroxy corresponding base"
agaccuuauuugguaaucutt

SEQ ID NO: 70 - DNA, 21 bp, artificial sequence
  siRNA cross-reactive to human and rhesus monkey Eg5
  5'-terminal nucleic acid is a nucleoside, i.e. base + sugar but lacking 5'-phosphate
  modified_base 5, 8, 12: /mod_base = "2'-O-methyl corresponding base"
  modified_base 21: /mod_base = "5'-thio thymidine"
  modified_base 1, 2, 3, 4, 6, 7, 9, 10, 11, 13, 14, 15, 16, 17, 18, 19: /mod_base = "2'-hydroxy corresponding base"
agauuaccaaauaaggucutt

SEQ ID NO: 71 - DNA, 21 bp, artificial sequence
  siRNA cross-reactive to human and rhesus monkey Eg5
  5'-terminal nucleic acid is a nucleoside, i.e. base + sugar but lacking 5'-phosphate
  modified_base 2, 3, 4, 5, 6, 7, 8, 15, 17, 19: /mod_base = "2'-O-methyl corresponding base"
  modified_base 21: /mod_base = "5'-thio thymidine"
  modified_base 1, 9, 10, 11, 12, 13, 14, 16, 18: /mod_base = "2'-hydroxy corresponding base"
auucucuuggagggcguactt

SEQ ID NO: 72 - DNA, 21 bp, artificial sequence
  siRNA cross-reactive to human and rhesus monkey Eg5
  5'-terminal nucleic acid is a nucleoside, i.e. base + sugar but lacking 5'-phosphate
  modified_base 2, 11: /mod_base = "2'-O-methyl corresponding base"
  modified_base 21: /mod_base = "5'-thio thymidine"
  modified_base 1, 3, 4, 5, 6, 7, 8, 9, 10, 12, 13, 14, 15, 16, 17, 18, 19: /mod_base = "2'-hydroxy corresponding base"
guacgcccuccaagagaautt

SEQ ID NO: 73 - DNA, 21 bp, artificial sequence
  siRNA cross-reactive to human and rhesus monkey Eg5
  5'-terminal nucleic acid is a nucleoside, i.e. base + sugar but lacking 5'-phosphate
  modified_base 3, 4, 7, 9, 12, 13, 14, 15, 17, 19: /mod_base = "2'-O-methyl corresponding base"
  modified_base 21: /mod_base = "5'-thio thymidine"
  modified_base 1, 2, 5, 6, 8, 10, 11, 16, 18: /mod_base = "2'-hydroxy corresponding base"
ggcugguauaauuccacgutt

SEQ ID NO: 74 - DNA, 21 bp, artificial sequence
  siRNA cross-reactive to human and rhesus monkey Eg5
  5'-terminal nucleic acid is a nucleoside, i.e. base + sugar but lacking 5'-phosphate
  modified_base 10, 12, 15: /mod_base = "2'-O-methyl corresponding base"
  modified_base 21: /mod_base = "5'-thio thymidine"
  modified_base 1, 2, 3, 4, 5, 6, 7, 8, 9, 11, 13, 14, 16, 17, 18, 19: /mod_base = "2'-hydroxy corresponding base"
acguggaauuauaccagcctt

SEQ ID NO: 75 - DNA, 21 bp, artificial sequence
  siRNA cross-reactive to human and rhesus monkey Eg5
  5'-terminal nucleic acid is a nucleoside, i.e. base + sugar but lacking 5'-phosphate
  modified_base 2, 9, 10, 13, 15, 16, 17, 19: /mod_base = "2'-O-methyl corresponding base"
  modified_base 21: /mod_base = "5'-thio thymidine"
  modified_base 1, 3, 4, 5, 6, 7, 8, 11, 12, 14, 18: /mod_base = "2'-hydroxy corresponding base"
gcggaaagcuagcgcccautt

SEQ ID NO: 76 - DNA, 21 bp, artificial sequence
  siRNA cross-reactive to human and rhesus monkey Eg5
  5'-terminal nucleic acid is a nucleoside, i.e. base + sugar but lacking 5'-phosphate
  modified_base 9: /mod_base = "2'-O-methyl corresponding base"
  modified_base 21: /mod_base = "5'-thio thymidine"
  modified_base 1, 2, 3, 4, 5, 6, 7, 8, 10, 11, 12, 13, 14, 15, 16, 17, 18, 19: /mod_base = "2'-hydroxy corresponding base"
augggcgcuagcuuuccgctt

SEQ ID NO: 77 - DNA, 21 bp, artificial sequence
  siRNA cross-reactive to human and rhesus monkey Eg5
  5'-terminal nucleic acid is a nucleoside, i.e. base + sugar but lacking 5'-phosphate
  modified_base 1, 3, 5, 6, 8, 9, 10, 11, 12, 14, 16, 18: /mod_base = "2'-O-methyl corresponding base"
  modified_base 21: /mod_base = "5'-thio thymidine"
  modified_base 2, 4, 7, 13, 15, 17, 19: /mod_base = "2'-hydroxy corresponding base"
ugcacuaucuuugcguaugtt

SEQ ID NO: 78 - DNA, 21 bp, artificial sequence
  siRNA cross-reactive to human and rhesus monkey Eg5
  5'-terminal nucleic acid is a nucleoside, i.e. base + sugar but lacking 5'-phosphate
  modified_base 1, 3, 7, 13, 18: /mod_base = "2'-O-methyl corresponding base"
  modified_base 21: /mod_base = "5'-thio thymidine"
  modified_base 2, 4, 5, 6, 8, 9, 10, 11, 12, 14, 15, 16, 17, 19: /mod_base = "2'-hydroxy corresponding base"
cauacgcaaagauagugcatt

SEQ ID NO: 79 - DNA, 21 bp, artificial sequence
  siRNA cross-reactive to human and rhesus monkey Eg5
  5'-terminal nucleic acid is a nucleoside, i.e. base + sugar but lacking 5'-phosphate
  modified_base 2, 4, 7, 8, 9, 10, 12, 14, 16, 17, 18, 19: /mod_base = "2'-O-methyl corresponding base"
  modified_base 21: /mod_base = "5'-thio thymidine"
  modified_base 1, 3, 5, 6, 11, 13, 15: /mod_base = "2'-hydroxy corresponding base"
guauaauuccacguacccutt

SEQ ID NO: 80 - DNA, 21 bp, artificial sequence
  siRNA cross-reactive to human and rhesus monkey Eg5
  5'-terminal nucleic acid is a nucleoside, i.e. base + sugar but lacking 5'-phosphate
  modified_base 5, 15, 17: /mod_base = "2'-O-methyl corresponding base"
  modified_base 21: /mod_base = "5'-thio thymidine"
  modified_base 1, 2, 3, 4, 6, 7, 8, 9, 10, 11, 12, 13, 14, 16, 18, 19: /mod_base = "2'-hydroxy corresponding base"
aggguacguggaauuauactt

SEQ ID NO: 81 - DNA, 21 bp, artificial sequence
  siRNA cross-reactive to human and rhesus monkey Eg5
  5'-terminal nucleic acid is a nucleoside, i.e. base + sugar but lacking 5'-phosphate
  modified_base 5, 6, 7, 11, 12, 15, 16: /mod_base = "2'-O-methyl corresponding base"
  modified_base 21: /mod_base = "5'-thio thymidine"
  modified_base 1, 2, 3, 4, 8, 9, 10, 13, 14, 17, 18, 19: /mod_base = "2'-hydroxy corresponding base"
agaaucuaaacuaacuagatt

SEQ ID NO: 82 - DNA, 21 bp, artificial sequence
  siRNA cross-reactive to human and rhesus monkey Eg5
  5'-terminal nucleic acid is a nucleoside, i.e. base + sugar but lacking 5'-phosphate
  modified_base 3, 7, 12: /mod_base = "2'-O-methyl corresponding base"
  modified_base 21: /mod_base = "5'-thio thymidine"
  modified_base 1, 2, 4, 5, 6, 8, 9, 10, 11, 13, 14, 15, 16, 17, 18, 19: /mod_base = "2'-hydroxy corresponding base"
ucuaguuaguuuagauucutt

SEQ ID NO: 83 - DNA, 21 bp, artificial sequence
  siRNA cross-reactive to human and rhesus monkey Eg5
  5'-terminal nucleic acid is a nucleoside, i.e. base + sugar but lacking 5'-phosphate
  modified_base 6, 7, 11, 16, 17, 19: /mod_base = "2'-O-methyl corresponding base"
  modified_base 21: /mod_base = "5'-thio thymidine"
  modified_base 1, 2, 3, 4, 5, 8, 9, 10, 12, 13, 14, 15, 18: /mod_base = "2'-hydroxy corresponding base"
aggagcugaauaggguuactt

SEQ ID NO: 84 - DNA, 21 bp, artificial sequence
  siRNA cross-reactive to human and rhesus monkey Eg5
  5'-terminal nucleic acid is a nucleoside, i.e. base + sugar but lacking 5'-phosphate
  modified_base 2, 8, 12: /mod_base = "2'-O-methyl corresponding base"
  modified_base 21: /mod_base = "5'-thio thymidine"
  modified_base 1, 3, 4, 5, 6, 7, 9, 10, 11, 13, 14, 15, 16, 17, 18, 19: /mod_base = "2'-hydroxy corresponding base"
guaacccuauucagcuccutt

SEQ ID NO: 85 - DNA, 21 bp, artificial sequence
  siRNA cross-reactive to human and rhesus monkey Eg5
  5'-terminal nucleic acid is a nucleoside, i.e. base + sugar but lacking 5'-phosphate
  modified_base 5, 7, 9, 14, 15, 16, 17, 19: /mod_base = "2'-O-methyl corresponding base"
  modified_base 21: /mod_base = "5'-thio thymidine"
  modified_base 1, 2, 3, 4, 6, 8, 10, 11, 12, 13, 18: /mod_base = "2'-hydroxy corresponding base"
gaaguacauaagaccuuautt

SEQ ID NO: 86 - DNA, 21 bp, artificial sequence
  siRNA cross-reactive to human and rhesus monkey Eg5
  5'-terminal nucleic acid is a nucleoside, i.e. base + sugar but lacking 5'-phosphate
  modified_base 2, 10, 14: /mod_base = "2'-O-methyl corresponding base"
  modified_base 21: /mod_base = "5'-thio thymidine"
  modified_base 1, 3, 4, 5, 6, 7, 8, 9, 11, 12, 13, 15, 16, 17, 18, 19: /mod_base = "2'-hydroxy corresponding base"
auaaggucuuauguacuuctt

SEQ ID NO: 87 - DNA, 21 bp, artificial sequence
  siRNA cross-reactive to human and rhesus monkey Eg5
  5'-terminal nucleic acid is a nucleoside, i.e. base + sugar but lacking 5'-phosphate
  modified_base 3, 6, 9, 10, 13, 18: /mod_base = "2'-O-methyl corresponding base"
  modified_base 21: /mod_base = "5'-thio thymidine"
  modified_base 1, 2, 4, 5, 7, 8, 11, 12, 14, 15, 16, 17, 19: /mod_base = "2'-hydroxy corresponding base"
gacaguggccgauaagauatt

SEQ ID NO: 88 - DNA, 21 bp, artificial sequence
  siRNA cross-reactive to human and rhesus monkey Eg5
  5'-terminal nucleic acid is a nucleoside, i.e. base + sugar but lacking 5'-phosphate
  modified_base 1, 6, 13: /mod_base = "2'-O-methyl corresponding base"
  modified_base 21: /mod_base = "5'-thio thymidine"
  modified_base 2, 3, 4, 5, 7, 8, 9, 10, 11, 12, 14, 15, 16, 17, 18, 19: /mod_base = "2'-hydroxy corresponding base"
uaucuuaucggccacuguctt

SEQ ID NO: 89 - DNA, 21 bp, artificial sequence
  siRNA cross-reactive to human and rhesus monkey Eg5
  5'-terminal nucleic acid is a nucleoside, i.e. base + sugar but lacking 5'-phosphate
  modified_base 4, 5, 7, 8, 9, 12, 15, 17, 18, 19: /mod_base = "2'-O-methyl corresponding base"
  modified_base 21: /mod_base = "5'-thio thymidine"
  modified_base 1, 2, 3, 6, 10, 11, 13, 14, 16: /mod_base = "2'-hydroxy corresponding base"
aaaccacuuaguagugucctt

SEQ ID NO: 90 - DNA, 21 bp, artificial sequence
  siRNA cross-reactive to human and rhesus monkey Eg5
  5'-terminal nucleic acid is a nucleoside, i.e. base + sugar but lacking 5'-phosphate
  modified_base 4, 7, 10: /mod_base = "2'-O-methyl corresponding base"
  modified_base 21: /mod_base = "5'-thio thymidine"
  modified_base 1, 2, 3, 5, 6, 8, 9, 11, 12, 13, 14, 15, 16, 17, 18, 19: /mod_base = "2'-hydroxy corresponding base"
ggacacuacuaagugguuutt

SEQ ID NO: 91 - DNA, 21 bp, artificial sequence
  siRNA cross-reactive to human and rhesus monkey Eg5
  5'-terminal nucleic acid is a nucleoside, i.e. base + sugar but lacking 5'-phosphate
  modified_base 1, 2, 3, 4, 5, 9, 10, 11, 12, 13, 14, 15, 17, 18, 19: /mod_base = "2'-O-methyl corresponding base"
  modified_base 21: /mod_base = "5'-thio thymidine"
  modified_base 6, 7, 8, 16: /mod_base = "2'-hydroxy corresponding base"
ucccuagacuucccuauuutt

SEQ ID NO: 92 - DNA, 21 bp, artificial sequence
  siRNA cross-reactive to human and rhesus monkey Eg5
  5'-terminal nucleic acid is a nucleoside, i.e. base + sugar but lacking 5'-phosphate
  modified_base 4, 14: /mod_base = "2'-O-methyl corresponding base"
  modified_base 21: /mod_base = "5'-thio thymidine"
  modified_base 1, 2, 3, 5, 6, 7, 8, 9, 10, 11, 12, 13, 15, 16, 17, 18, 19: /mod_base = "2'-hydroxy corresponding base"
aaauagggaagucuagggatt

SEQ ID NO: 93 - DNA, 21 bp, artificial sequence
  siRNA cross-reactive to human and rhesus monkey Eg5
  5'-terminal nucleic acid is a nucleoside, i.e. base + sugar but lacking 5'-phosphate
  modified_base 1, 5, 6, 7, 8, 9, 10, 11, 13, 14, 15, 16, 18, 19: /mod_base = "2'-O-methyl corresponding base"
  modified_base 21: /mod_base = "5'-thio thymidine"
  modified_base 2, 3, 4, 12, 17: /mod_base = "2'-hydroxy corresponding base"
uagacuucccuauuucgcutt

SEQ ID NO: 94 - DNA, 21 bp, artificial sequence
  siRNA cross-reactive to human and rhesus monkey Eg5
  5'-terminal nucleic acid is a nucleoside, i.e. base + sugar but lacking 5'-phosphate
  modified_base 8, 18: /mod_base = "2'-O-methyl corresponding base"
  modified_base 21: /mod_base = "5'-thio thymidine"
  modified_base 1, 2, 3, 4, 5, 6, 7, 9, 10, 11, 12, 13, 14, 15, 16, 17, 19: /mod_base = "2'-hydroxy corresponding base"
agcgaaauagggaagucuatt

SEQ ID NO: 95 - DNA, 21 bp, artificial sequence
  siRNA cross-reactive to human and rhesus monkey Eg5
  5'-terminal nucleic acid is a nucleoside, i.e. base + sugar but lacking 5'-phosphate
  modified_base 2, 4, 5, 7, 10, 11, 15, 16, 17, 19: /mod_base = "2'-O-methyl corresponding base"
  modified_base 21: /mod_base = "5'-thio thymidine"
  modified_base 1, 3, 6, 8, 9, 12, 13, 14, 18: /mod_base = "2'-hydroxy corresponding base"
gcgucgcagccaaauucgutt

SEQ ID NO: 96 - DNA, 21 bp, artificial sequence
  siRNA cross-reactive to human and rhesus monkey Eg5
  5'-terminal nucleic acid is a nucleoside, i.e. base + sugar but lacking 5'-phosphate
  modified_base 21: /mod_base = "5'-thio thymidine"
  modified_base 1..19: /mod_base = "2'-hydroxy corresponding base"
acgaauuuggcugcgacgctt

SEQ ID NO: 97 - DNA, 21 bp, artificial sequence
  siRNA cross-reactive to human and rhesus monkey Eg5
  5'-terminal nucleic acid is a nucleoside, i.e. base + sugar but lacking 5'-phosphate
  modified_base 3, 4, 7, 9, 10, 11, 13, 14, 15, 18: /mod_base = "2'-O-methyl corresponding base"
  modified_base 21: /mod_base = "5'-thio thymidine"
  modified_base 1, 2, 5, 6, 8, 12, 16, 17, 19: /mod_base = "2'-hydroxy corresponding base"
agcuagcgcccauucaauatt

SEQ ID NO: 98 - DNA, 21 bp, artificial sequence
  siRNA cross-reactive to human and rhesus monkey Eg5
  5'-terminal nucleic acid is a nucleoside, i.e. base + sugar but lacking 5'-phosphate
  modified_base 1, 15: /mod_base = "2'-O-methyl corresponding base"
  modified_base 21: /mod_base = "5'-thio thymidine"
  modified_base 2, 3, 4, 5, 6, 7, 8, 9, 10, 11, 12, 13, 14, 16, 17, 18, 19: /mod_base = "2'-hydroxy corresponding base"
uauugaaugggcgcuagcutt

SEQ ID NO: 99 - DNA, 21 bp, artificial sequence
  siRNA cross-reactive to human and rhesus monkey Eg5
  5'-terminal nucleic acid is a nucleoside, i.e. base + sugar but lacking 5'-phosphate
  modified_base 5, 6, 8, 11, 12, 15: /mod_base = "2'-O-methyl corresponding base"
  modified_base 21: /mod_base = "5'-thio thymidine"
  modified_base 1, 2, 3, 4, 7, 9, 10, 13, 14, 16, 17, 18, 19: /mod_base = "2'-hydroxy corresponding base"
gaaacuacgauugauggagtt

SEQ ID NO: 100 - DNA, 21 bp, artificial sequence
  siRNA cross-reactive to human and rhesus monkey Eg5
  5'-terminal nucleic acid is a nucleoside, i.e. base + sugar but lacking 5'-phosphate
  modified_base 4, 7, 13: /mod_base = "2'-O-methyl corresponding base"
  modified_base 21: /mod_base = "5'-thio thymidine"
  modified_base 1, 2, 3, 5, 6, 8, 9, 10, 11, 12, 14, 15, 16, 17, 18, 19: /mod_base = "2'-hydroxy corresponding base"
cuccaucaaucguaguuuctt

SEQ ID NO: 101 - DNA, 21 bp, artificial sequence
  siRNA cross-reactive to human and rhesus monkey Eg5
  5'-terminal nucleic acid is a nucleoside, i.e. base + sugar but lacking 5'-phosphate
  modified_base 1, 2, 5, 10, 17, 18: /mod_base = "2'-O-methyl corresponding base"
  modified_base 21: /mod_base = "5'-thio thymidine"
  modified_base 3, 4, 6, 7, 8, 9, 11, 12, 13, 14, 15, 16, 19: /mod_base = "2'-hydroxy corresponding base"
ccgauaagauagaagaucatt

SEQ ID NO: 102 - DNA, 21 bp, artificial sequence
  siRNA cross-reactive to human and rhesus monkey Eg5
  5'-terminal nucleic acid is a nucleoside, i.e. base + sugar but lacking 5'-phosphate
  modified_base 9, 14: /mod_base = "2'-O-methyl corresponding base"
  modified_base 21: /mod_base = "5'-thio thymidine"
  modified_base 1, 2, 3, 4, 5, 6, 7, 8, 10, 11, 12, 13, 15, 16, 17, 18, 19: /mod_base = "2'-hydroxy corresponding base"
ugaucuucuaucuuaucggtt

SEQ ID NO: 103 - DNA, 21 bp, artificial sequence
  siRNA cross-reactive to human and rhesus monkey Eg5
  5'-terminal nucleic acid is a nucleoside, i.e. base + sugar but lacking 5'-phosphate
  modified_base 1, 4, 6, 7, 8, 10, 11, 12, 15, 18: /mod_base = "2'-O-methyl corresponding base"
  modified_base 21: /mod_base = "5'-thio thymidine"
  modified_base 2, 3, 5, 9, 13, 14, 16, 17, 19: /mod_base = "2'-hydroxy corresponding base"
uagcgcccauucaauaguatt

SEQ ID NO: 104 - DNA, 21 bp, artificial sequence
  siRNA cross-reactive to human and rhesus monkey Eg5
  5'-terminal nucleic acid is a nucleoside, i.e. base + sugar but lacking 5'-phosphate
  modified_base 1, 4, 18: /mod_base = "2'-O-methyl corresponding base"
  modified_base 21: /mod_base = "5'-thio thymidine"
  modified_base 2, 3, 5, 6, 7, 8, 9, 10, 11, 12, 13, 14, 15, 16, 17, 19: /mod_base = "2'-hydroxy corresponding base"
uacuauugaaugggcgcuatt

SEQ ID NO: 105 - DNA, 21 bp, artificial sequence
  siRNA cross-reactive to human and rhesus monkey Eg5
  5'-terminal nucleic acid is a nucleoside, i.e. base + sugar but lacking 5'-phosphate
  modified_base 1, 2, 3, 5, 7, 9, 12, 13, 17, 18: /mod_base = "2'-O-methyl corresponding base"
  modified_base 21: /mod_base = "5'-thio thymidine"
  modified_base 4, 6, 8, 10, 11, 14, 15, 16, 19: /mod_base = "2'-hydroxy corresponding base"
uuugcguauggccaaacugtt

SEQ ID NO: 106 - DNA, 21 bp, artificial sequence
  siRNA cross-reactive to human and rhesus monkey Eg5
  5'-terminal nucleic acid is a nucleoside, i.e. base + sugar but lacking 5'-phosphate
  modified_base 1, 10, 12, 16: /mod_base = "2'-O-methyl corresponding base"
  modified_base 21: /mod_base = "5'-thio thymidine"
  modified_base 2, 3, 4, 5, 6, 7, 8, 9, 11, 13, 14, 15, 17, 18, 19: /mod_base = "2'-hydroxy corresponding base"
caguuuggccauacgcaaatt

SEQ ID NO: 107 - DNA, 21 bp, artificial sequence
  siRNA cross-reactive to human and rhesus monkey Eg5
  5'-terminal nucleic acid is a nucleoside, i.e. base + sugar but lacking 5'-phosphate
  modified_base 1, 3, 5, 7, 8, 9, 10, 11, 12, 14, 15, 19: /mod_base = "2'-O-methyl corresponding base"
  modified_base 21: /mod_base = "5'-thio thymidine"
  modified_base 2, 4, 6, 13, 16, 17, 18: /mod_base = "2'-hydroxy corresponding base"
cacguacccuucaucaaautt

SEQ ID NO: 108 - DNA, 21 bp, artificial sequence
  siRNA cross-reactive to human and rhesus monkey Eg5
  5'-terminal nucleic acid is a nucleoside, i.e. base + sugar but lacking 5'-phosphate
  modified_base 14: /mod_base = "2'-O-methyl corresponding base"
  modified_base 21: /mod_base = "5'-thio thymidine"
  modified_base 1, 2, 3, 4, 5, 6, 7, 8, 9, 10, 11, 12, 13, 15, 16, 17, 18, 19: /mod_base = "2'-hydroxy corresponding base"
auuugaugaaggguacgugtt

SEQ ID NO: 109 - DNA, 21 bp, artificial sequence
  siRNA cross-reactive to human and rhesus monkey Eg5
  5'-terminal nucleic acid is a nucleoside, i.e. base + sugar but lacking 5'-phosphate
  modified_base 1, 2, 3, 4, 5, 7, 9, 11, 14, 15, 19: /mod_base = "2'-O-methyl corresponding base"
  modified_base 21: /mod_base = "5'-thio thymidine"
  modified_base 6, 8, 10, 12, 13, 16, 17, 18: /mod_base = "2'-hydroxy corresponding base"
ucuuugcguauggccaaactt

SEQ ID NO: 110 - DNA, 21 bp, artificial sequence
  siRNA cross-reactive to human and rhesus monkey Eg5
  5'-terminal nucleic acid is a nucleoside, i.e. base + sugar but lacking 5'-phosphate
  modified_base 8, 10, 14: /mod_base = "2'-O-methyl corresponding base"
  modified_base 21: /mod_base = "5'-thio thymidine"
  modified_base 1, 2, 3, 4, 5, 6, 7, 9, 11, 12, 13, 15, 16, 17, 18, 19: /mod_base = "2'-hydroxy corresponding base"
guuuggccauacgcaaagatt

SEQ ID NO: 111 - DNA, 21 bp, artificial sequence
  siRNA cross-reactive to human and rhesus monkey Eg5
  5'-terminal nucleic acid is a nucleoside, i.e. base + sugar but lacking 5'-phosphate
  modified_base 1, 2, 7, 9, 10, 12, 13, 14, 16, 17, 18: /mod_base = "2'-O-methyl corresponding base"
  modified_base 21: /mod_base = "5'-thio thymidine"
  modified_base 3, 4, 5, 6, 8, 11, 15, 19: /mod_base = "2'-hydroxy corresponding base"
ccgaaguguuguuuguccatt

SEQ ID NO: 112 - DNA, 21 bp, artificial sequence
  siRNA cross-reactive to human and rhesus monkey Eg5
  5'-terminal nucleic acid is a nucleoside, i.e. base + sugar but lacking 5'-phosphate
  modified_base 5, 9, 12: /mod_base = "2'-O-methyl corresponding base"
  modified_base 21: /mod_base = "5'-thio thymidine"
  modified_base 1, 2, 3, 4, 6, 7, 8, 10, 11, 13, 14, 15, 16, 17, 18, 19: /mod_base = "2'-hydroxy corresponding base"
uggacaaacaacacuucggtt

SEQ ID NO: 113 - DNA, 21 bp, artificial sequence
  siRNA cross-reactive to human and rhesus monkey Eg5
  5'-terminal nucleic acid is a nucleoside, i.e. base + sugar but lacking 5'-phosphate
  modified_base 5, 12, 13, 16, 18, 19: /mod_base = "2'-O-methyl corresponding base"
  modified_base 21: /mod_base = "5'-thio thymidine"
  modified_base 1, 2, 3, 4, 6, 7, 8, 9, 10, 11, 14, 15, 17: /mod_base = "2'-hydroxy corresponding base"
agagcggaaagcuagcgcctt

SEQ ID NO: 114 - DNA, 21 bp, artificial sequence
  siRNA cross-reactive to human and rhesus monkey Eg5
  5'-terminal nucleic acid is a nucleoside, i.e. base + sugar but lacking 5'-phosphate
  modified_base 6: /mod_base = "2'-O-methyl corresponding base"
  modified_base 21: /mod_base = "5'-thio thymidine"
  modified_base 1, 2, 3, 4, 5, 7, 8, 9, 10, 11, 12, 13, 14, 15, 16, 17, 18, 19: /mod_base = "2'-hydroxy corresponding base"
ggcgcuagcuuuccgcucutt

SEQ ID NO: 115 - DNA, 21 bp, artificial sequence
  siRNA cross-reactive to human and rhesus monkey Eg5
  5'-terminal nucleic acid is a nucleoside, i.e. base + sugar but lacking 5'-phosphate
  modified_base 2, 3, 6, 8, 9, 10, 12, 13, 14, 17: /mod_base = "2'-O-methyl corresponding base"
  modified_base 21: /mod_base = "5'-thio thymidine"
  modified_base 1, 4, 5, 7, 11, 15, 16, 18, 19: /mod_base = "2'-hydroxy corresponding base"
gcuagcgcccauucaauagtt

SEQ ID NO: 116 - DNA, 21 bp, artificial sequence
  siRNA cross-reactive to human and rhesus monkey Eg5
  5'-terminal nucleic acid is a nucleoside, i.e. base + sugar but lacking 5'-phosphate
  modified_base 2, 16: /mod_base = "2'-O-methyl corresponding base"
  modified_base 21: /mod_base = "5'-thio thymidine"
  modified_base 1, 3, 4, 5, 6, 7, 8, 9, 10, 11, 12, 13, 14, 15, 17, 18, 19: /mod_base = "2'-hydroxy corresponding base"
cuauugaaugggcgcuagctt

SEQ ID NO: 117 - DNA, 21 bp, artificial sequence
  siRNA cross-reactive to human and rhesus monkey Eg5
  5'-terminal nucleic acid is a nucleoside, i.e. base + sugar but lacking 5'-phosphate
  modified_base 4, 5, 8, 10, 12, 16, 17: /mod_base = "2'-O-methyl corresponding base"
  modified_base 21: /mod_base = "5'-thio thymidine"
  modified_base 1, 2, 3, 6, 7, 9, 11, 13, 14, 15, 18, 19: /mod_base = "2'-hydroxy corresponding base"
aaguuaguguacgaacuggtt

SEQ ID NO: 118 - DNA, 21 bp, artificial sequence
  siRNA cross-reactive to human and rhesus monkey Eg5
  5'-terminal nucleic acid is a nucleoside, i.e. base + sugar but lacking 5'-phosphate
  modified_base 2, 9, 11, 14: /mod_base = "2'-O-methyl corresponding base"
  modified_base 21: /mod_base = "5'-thio thymidine"
  modified_base 1, 3, 4, 5, 6, 7, 8, 10, 12, 13, 15, 16, 17, 18, 19: /mod_base = "2'-hydroxy corresponding base"
ccaguucguacacuaacuutt

SEQ ID NO: 119 - DNA, 21 bp, artificial sequence
  siRNA cross-reactive to human and rhesus monkey Eg5
  5'-terminal nucleic acid is a nucleoside, i.e. base + sugar but lacking 5'-phosphate
  modified_base 2, 4, 8, 9, 16, 17: /mod_base = "2'-O-methyl corresponding base"
  modified_base 21: /mod_base = "5'-thio thymidine"
  modified_base 1, 3, 5, 6, 7, 10, 11, 12, 13, 14, 15, 18, 19: /mod_base = "2'-hydroxy corresponding base"
guacgaacuggaggauuggtt

SEQ ID NO: 120 - DNA, 21 bp, artificial sequence
  siRNA cross-reactive to human and rhesus monkey Eg5
  5'-terminal nucleic acid is a nucleoside, i.e. base + sugar but lacking 5'-phosphate
  modified_base 2, 10, 17: /mod_base = "2'-O-methyl corresponding base"
  modified_base 21: /mod_base = "5'-thio thymidine"
  modified_base 1, 3, 4, 5, 6, 7, 8, 9, 11, 12, 13, 14, 15, 16, 18, 19: /mod_base = "2'-hydroxy corresponding base"
ccaauccuccaguucguactt

SEQ ID NO: 121 - DNA, 21 bp, artificial sequence
  siRNA cross-reactive to human and rhesus monkey Eg5
  5'-terminal nucleic acid is a nucleoside, i.e. base + sugar but lacking 5'-phosphate
  modified_base 2, 6, 7, 14, 15, 18, 19: /mod_base = "2'-O-methyl corresponding base"
  modified_base 21: /mod_base = "5'-thio thymidine"
  modified_base 1, 3, 4, 5, 8, 9, 10, 11, 12, 13, 16, 17: /mod_base = "2'-hydroxy corresponding base"
acgaacuggaggauuggcutt

SEQ ID NO: 122 - DNA, 21 bp, artificial sequence
  siRNA cross-reactive to human and rhesus monkey Eg5
  5'-terminal nucleic acid is a nucleoside, i.e. base + sugar but lacking 5'-phosphate
  modified_base 4, 12: /mod_base = "2'-O-methyl corresponding base"
  modified_base 21: /mod_base = "5'-thio thymidine"
  modified_base 1, 2, 3, 5, 6, 7, 8, 9, 10, 11, 13, 14, 15, 16, 17, 18, 19: /mod_base = "2'-hydroxy corresponding base"
agccaauccuccaguucgutt

SEQ ID NO: 123 - DNA, 21 bp, artificial sequence
  siRNA cross-reactive to human and rhesus monkey Eg5
  5'-terminal nucleic acid is a nucleoside, i.e. base + sugar but lacking 5'-phosphate
  modified_base 4, 5, 8, 10, 11, 12, 14, 15: /mod_base = "2'-O-methyl corresponding base"
  modified_base 21: /mod_base = "5'-thio thymidine"
  modified_base 1, 2, 3, 6, 7, 9, 13, 16, 17, 18, 19: /mod_base = "2'-hydroxy corresponding base"
agauugauguuuaccgaagtt

SEQ ID NO: 124 - DNA, 21 bp, artificial sequence
  siRNA cross-reactive to human and rhesus monkey Eg5
  5'-terminal nucleic acid is a nucleoside, i.e. base + sugar but lacking 5'-phosphate
  modified_base 7, 11, 14: /mod_base = "2'-O-methyl corresponding base"
  modified_base 21: /mod_base = "5'-thio thymidine"
  modified_base 1, 2, 3, 4, 5, 6, 8, 9, 10, 12, 13, 15, 16, 17, 18, 19: /mod_base = "2'-hydroxy corresponding base"
cuucgguaaacaucaaucutt

SEQ ID NO: 125 - DNA, 21 bp, artificial sequence
  siRNA cross-reactive to human and rhesus monkey Eg5
  5'-terminal nucleic acid is a nucleoside, i.e. base + sugar but lacking 5'-phosphate
  modified_base 1, 3, 7, 8, 10, 13, 14, 16, 18, 19: /mod_base = "2'-O-methyl corresponding base"
  modified_base 21: /mod_base = "5'-thio thymidine"
  modified_base 2, 4, 5, 6, 9, 11, 12, 15, 17: /mod_base = "2'-hydroxy corresponding base"
uaugggcuauaauugcacutt

SEQ ID NO: 126 - DNA, 21 bp, artificial sequence
  siRNA cross-reactive to human and rhesus monkey Eg5
  5'-terminal nucleic acid is a nucleoside, i.e. base + sugar but lacking 5'-phosphate
  modified_base 5, 9, 11, 16, 18: /mod_base = "2'-O-methyl corresponding base"
  modified_base 21: /mod_base = "5'-thio thymidine"
  modified_base 1, 2, 3, 4, 6, 7, 8, 10, 12, 13, 14, 15, 17, 19: /mod_base = "2'-hydroxy corresponding base"
agugcaauuauagcccauatt

SEQ ID NO: 127 - DNA, 21 bp, artificial sequence
  siRNA cross-reactive to human and rhesus monkey Eg5
  5'-terminal nucleic acid is a nucleoside, i.e. base + sugar but lacking 5'-phosphate
  modified_base 2, 3, 4, 5, 6, 8, 10, 12, 15, 16: /mod_base = "2'-O-methyl corresponding base"
  modified_base 21: /mod_base = "5'-thio thymidine"
  modified_base 1, 7, 9, 11, 13, 14, 17, 18, 19: /mod_base = "2'-hydroxy corresponding base"
aucuuugcguauggccaaatt

SEQ ID NO: 128 - DNA, 21 bp, artificial sequence
  siRNA cross-reactive to human and rhesus monkey Eg5
  5'-terminal nucleic acid is a nucleoside, i.e. base + sugar but lacking 5'-phosphate
  modified_base 7, 9, 13: /mod_base = "2'-O-methyl corresponding base"
  modified_base 21: /mod_base = "5'-thio thymidine"
  modified_base 1, 2, 3, 4, 5, 6, 8, 10, 11, 12, 14, 15, 16, 17, 18, 19: /mod_base = "2'-hydroxy corresponding base"
uuuggccauacgcaaagautt

SEQ ID NO: 129 - DNA, 21 bp, artificial sequence
  siRNA cross-reactive to human and rhesus monkey Eg5
  5'-terminal nucleic acid is a nucleoside, i.e. base + sugar but lacking 5'-phosphate
  modified_base 2, 3, 4, 5, 8, 9, 11, 12, 13, 14, 15, 17, 18, 19: /mod_base = "2'-O-methyl corresponding base"
  modified_base 21: /mod_base = "5'-thio thymidine"
  modified_base 1, 6, 7, 10, 16: /mod_base = "2'-hydroxy corresponding base"
acucuagucguucccacuctt

SEQ ID NO: 130 - DNA, 21 bp, artificial sequence
  siRNA cross-reactive to human and rhesus monkey Eg5
  5'-terminal nucleic acid is a nucleoside, i.e. base + sugar but lacking 5'-phosphate
  modified_base 14: /mod_base = "2'-O-methyl corresponding base"
  modified_base 21: /mod_base = "5'-thio thymidine"
  modified_base 1, 2, 3, 4, 5, 6, 7, 8, 9, 10, 11, 12, 13, 15, 16, 17, 18, 19: /mod_base = "2'-hydroxy corresponding base"
gagugggaacgacuagagutt

SEQ ID NO: 131 - DNA, 21 bp, artificial sequence
  siRNA cross-reactive to human and rhesus monkey Eg5
  5'-terminal nucleic acid is a nucleoside, i.e. base + sugar but lacking 5'-phosphate
  modified_base 3, 4, 6, 9, 10, 13: /mod_base = "2'-O-methyl corresponding base"
  modified_base 21: /mod_base = "5'-thio thymidine"
  modified_base 1, 2, 5, 7, 8, 11, 12, 14, 15, 16, 17, 18, 19: /mod_base = "2'-hydroxy corresponding base"
aacuacgauugauggagaatt

SEQ ID NO: 132 - DNA, 21 bp, artificial sequence
  siRNA cross-reactive to human and rhesus monkey Eg5
  5'-terminal nucleic acid is a nucleoside, i.e. base + sugar but lacking 5'-phosphate
  modified_base 6, 9, 15: /mod_base = "2'-O-methyl corresponding base"
  modified_base 21: /mod_base = "5'-thio thymidine"
  modified_base 1, 2, 3, 4, 5, 7, 8, 10, 11, 12, 13, 14, 16, 17, 18, 19: /mod_base = "2'-hydroxy corresponding base"
uucuccaucaaucguaguutt

SEQ ID NO: 133 - DNA, 21 bp, artificial sequence
  siRNA cross-reactive to human and rhesus monkey Eg5
  5'-terminal nucleic acid is a nucleoside, i.e. base + sugar but lacking 5'-phosphate
  modified_base 3, 11, 12, 13: /mod_base = "2'-O-methyl corresponding base"
  modified_base 21: /mod_base = "5'-thio thymidine"
  modified_base 1, 2, 4, 5, 6, 7, 8, 9, 10, 14, 15, 16, 17, 18, 19: /mod_base = "2'-hydroxy corresponding base"
gauaagagagcucgggaagtt

SEQ ID NO: 134 - DNA, 21 bp, artificial sequence
  siRNA cross-reactive to human and rhesus monkey Eg5
  5'-terminal nucleic acid is a nucleoside, i.e. base + sugar but lacking 5'-phosphate
  modified_base 16: /mod_base = "2'-O-methyl corresponding base"
  modified_base 21: /mod_base = "5'-thio thymidine"
  modified_base 1, 2, 3, 4, 5, 6, 7, 8, 9, 10, 11, 12, 13, 14, 15, 17, 18, 19: /mod_base = "2'-hydroxy corresponding base"
cuucccgagcucucuuauctt

SEQ ID NO: 135 - DNA, 21 bp, artificial sequence
  siRNA cross-reactive to human and rhesus monkey Eg5
  5'-terminal nucleic acid is a nucleoside, i.e. base + sugar but lacking 5'-phosphate
  modified_base 1, 2, 8, 9, 10, 14, 15, 18, 19: /mod_base = "2'-O-methyl corresponding base"
  modified_base 21: /mod_base = "5'-thio thymidine"
  modified_base 3, 4, 5, 6, 7, 11, 12, 13, 16, 17: /mod_base = "2'-hydroxy corresponding base"
ucgagaaucuaaacuaacutt

SEQ ID NO: 136 - DNA, 21 bp, artificial sequence
  siRNA cross-reactive to human and rhesus monkey Eg5
  5'-terminal nucleic acid is a nucleoside, i.e. base + sugar but lacking 5'-phosphate
  modified_base 4, 9: /mod_base = "2'-O-methyl corresponding base"
  modified_base 21: /mod_base = "5'-thio thymidine"
  modified_base 1, 2, 3, 5, 6, 7, 8, 10, 11, 12, 13, 14, 15, 16, 17, 18, 19: /mod_base = "2'-hydroxy corresponding base"
aguuaguuuagauucucgatt

SEQ ID NO: 137 - DNA, 21 bp, artificial sequence
  siRNA cross-reactive to human and rhesus monkey Eg5
  5'-terminal nucleic acid is a nucleoside, i.e. base + sugar but lacking 5'-phosphate
  modified_base 3, 4, 7, 8, 13, 14, 15, 16, 17, 18: /mod_base = "2'-O-methyl corresponding base"
  modified_base 21: /mod_base = "5'-thio thymidine"
  modified_base 1, 2, 5, 6, 9, 10, 11, 12, 19: /mod_base = "2'-hydroxy corresponding base"
aacuaacuagaauccuccatt

SEQ ID NO: 138 - DNA, 21 bp, artificial sequence
  siRNA cross-reactive to human and rhesus monkey Eg5
  5'-terminal nucleic acid is a nucleoside, i.e. base + sugar but lacking 5'-phosphate
  modified_base 11, 15: /mod_base = "2'-O-methyl corresponding base"
  modified_base 21: /mod_base = "5'-thio thymidine"
  modified_base 1, 2, 3, 4, 5, 6, 7, 8, 9, 10, 12, 13, 14, 16, 17, 18, 19: /mod_base = "2'-hydroxy corresponding base"
uggaggauucuaguuaguutt

SEQ ID NO: 139 - DNA, 21 bp, artificial sequence
  siRNA cross-reactive to human and rhesus monkey Eg5
  5'-terminal nucleic acid is a nucleoside, i.e. base + sugar but lacking 5'-phosphate
  modified_base 4, 5, 7, 15, 18, 19: /mod_base = "2'-O-methyl corresponding base"
  modified_base 21: /mod_base = "5'-thio thymidine"
  modified_base 1, 2, 3, 6, 8, 9, 10, 11, 12, 13, 14, 16, 17: /mod_base = "2'-hydroxy corresponding base"
ggaucguaagaaggcaguutt

SEQ ID NO: 140 - DNA, 21 bp, artificial sequence
  siRNA cross-reactive to human and rhesus monkey Eg5
  5'-terminal nucleic acid is a nucleoside, i.e. base + sugar but lacking 5'-phosphate
  modified_base 12: /mod_base = "2'-O-methyl corresponding base"
  modified_base 21: /mod_base = "5'-thio thymidine"
  modified_base 1, 2, 3, 4, 5, 6, 7, 8, 9, 10, 11, 13, 14, 15, 16, 17, 18, 19: /mod_base = "2'-hydroxy corresponding base"
aacugccuucuuacgaucctt

SEQ ID NO: 141 - DNA, 21 bp, artificial sequence
  siRNA cross-reactive to human and rhesus monkey Eg5
  5'-terminal nucleic acid is a nucleoside, i.e. base + sugar but lacking 5'-phosphate
  modified_base 2, 3, 5, 13, 16, 17: /mod_base = "2'-O-methyl corresponding base"
  modified_base 21: /mod_base = "5'-thio thymidine"
  modified_base 1, 4, 6, 7, 8, 9, 10, 11, 12, 14, 15, 18, 19: /mod_base = "2'-hydroxy corresponding base"
aucguaagaaggcaguugatt

SEQ ID NO: 142 - DNA, 21 bp, artificial sequence
  siRNA cross-reactive to human and rhesus monkey Eg5
  5'-terminal nucleic acid is a nucleoside, i.e. base + sugar but lacking 5'-phosphate
  modified_base 2, 14: /mod_base = "2'-O-methyl corresponding base"
  modified_base 21: /mod_base = "5'-thio thymidine"
  modified_base 1, 3, 4, 5, 6, 7, 8, 9, 10, 11, 12, 13, 15, 16, 17, 18, 19: /mod_base = "2'-hydroxy corresponding base"
ucaacugccuucuuacgautt

SEQ ID NO: 143 - DNA, 21 bp, artificial sequence
  siRNA cross-reactive to human and rhesus monkey Eg5
  5'-terminal nucleic acid is a nucleoside, i.e. base + sugar but lacking 5'-phosphate
  modified_base 4, 7, 8, 11, 12, 15, 17: /mod_base = "2'-O-methyl corresponding base"
  modified_base 21: /mod_base = "5'-thio thymidine"
  modified_base 1, 2, 3, 5, 6, 9, 10, 13, 14, 16, 18, 19: /mod_base = "2'-hydroxy corresponding base"
aggcaguugaccaacacaatt

SEQ ID NO: 144 - DNA, 21 bp, artificial sequence
  siRNA cross-reactive to human and rhesus monkey Eg5
  5'-terminal nucleic acid is a nucleoside, i.e. base + sugar but lacking 5'-phosphate
  modified_base 11: /mod_base = "2'-O-methyl corresponding base"
  modified_base 21: /mod_base = "5'-thio thymidine"
  modified_base 1, 2, 3, 4, 5, 6, 7, 8, 9, 10, 12, 13, 14, 15, 16, 17, 18, 19: /mod_base = "2'-hydroxy corresponding base"
uuguguuggucaacugccutt

SEQ ID NO: 145 - DNA, 21 bp, artificial sequence
  siRNA cross-reactive to human and rhesus monkey Eg5
  5'-terminal nucleic acid is a nucleoside, i.e. base + sugar but lacking 5'-phosphate
  modified_base 1, 4, 5, 8, 13: /mod_base = "2'-O-methyl corresponding base"
  modified_base 21: /mod_base = "5'-thio thymidine"
  modified_base 2, 3, 6, 7, 9, 10, 11, 12, 14, 15, 16, 17, 18, 19: /mod_base = "2'-hydroxy corresponding base"
uggccgauaagauagaagatt

SEQ ID NO: 146 - DNA, 21 bp, artificial sequence
  siRNA cross-reactive to human and rhesus monkey Eg5
  5'-terminal nucleic acid is a nucleoside, i.e. base + sugar but lacking 5'-phosphate
  modified_base 6, 11, 18: /mod_base = "2'-O-methyl corresponding base"
  modified_base 21: /mod_base = "5'-thio thymidine"
  modified_base 1, 2, 3, 4, 5, 7, 8, 9, 10, 12, 13, 14, 15, 16, 17, 19: /mod_base = "2'-hydroxy corresponding base"
ucuucuaucuuaucggccatt

SEQ ID NO: 147 - DNA, 21 bp, artificial sequence
  siRNA cross-reactive to human and rhesus monkey Eg5
  5'-terminal nucleic acid is a nucleoside, i.e. base + sugar but lacking 5'-phosphate
  modified_base 1, 2, 3, 9, 11, 14, 15, 18: /mod_base = "2'-O-methyl corresponding base"
  modified_base 21: /mod_base = "5'-thio thymidine"
  modified_base 4, 5, 6, 7, 8, 10, 12, 13, 16, 17, 19: /mod_base = "2'-hydroxy corresponding base"
ucuaaggauauagucaacatt

SEQ ID NO: 148 - DNA, 21 bp, artificial sequence
  siRNA cross-reactive to human and rhesus monkey Eg5
  5'-terminal nucleic acid is a nucleoside, i.e. base + sugar but lacking 5'-phosphate
  modified_base 8, 10, 16: /mod_base = "2'-O-methyl corresponding base"
  modified_base 21: /mod_base = "5'-thio thymidine"
  modified_base 1, 2, 3, 4, 5, 6, 7, 9, 11, 12, 13, 14, 15, 17, 18, 19: /mod_base = "2'-hydroxy corresponding base"
uguugacuauauccuuagatt

SEQ ID NO: 149 - DNA, 21 bp, artificial sequence
  siRNA cross-reactive to human and rhesus monkey Eg5
  5'-terminal nucleic acid is a nucleoside, i.e. base + sugar but lacking 5'-phosphate
  modified_base 2, 3, 7, 8, 9, 12, 13, 15, 16, 17, 18, 19: /mod_base = "2'-O-methyl corresponding base"
  modified_base 21: /mod_base = "5'-thio thymidine"
  modified_base 1, 4, 5, 6, 10, 11, 14: /mod_base = "2'-hydroxy corresponding base"
acuaagcuuaauugcuuuctt

SEQ ID NO: 150 - DNA, 21 bp, artificial sequence
  siRNA cross-reactive to human and rhesus monkey Eg5
  5'-terminal nucleic acid is a nucleoside, i.e. base + sugar but lacking 5'-phosphate
  modified_base 6, 10, 16: /mod_base = "2'-O-methyl corresponding base"
  modified_base 21: /mod_base = "5'-thio thymidine"
  modified_base 1, 2, 3, 4, 5, 7, 8, 9, 11, 12, 13, 14, 15, 17, 18, 19: /mod_base = "2'-hydroxy corresponding base"
gaaagcaauuaagcuuagutt

SEQ ID NO: 151 - DNA, 21 bp, artificial sequence
  siRNA cross-reactive to human and rhesus monkey Eg5
  5'-terminal nucleic acid is a nucleoside, i.e. base + sugar but lacking 5'-phosphate
  modified_base 2, 3, 4, 8, 9, 12, 13, 14, 15, 16, 19: /mod_base = "2'-O-methyl corresponding base"
  modified_base 21: /mod_base = "5'-thio thymidine"
  modified_base 1, 5, 6, 7, 10, 11, 17, 18: /mod_base = "2'-hydroxy corresponding base"
gcccagaucaaccuuuaautt

SEQ ID NO: 152 - DNA, 21 bp, artificial sequence
  siRNA cross-reactive to human and rhesus monkey Eg5
  5'-terminal nucleic acid is a nucleoside, i.e. base + sugar but lacking 5'-phosphate
  modified_base 3: /mod_base = "2'-O-methyl corresponding base"
  modified_base 21: /mod_base = "5'-thio thymidine"
  modified_base 1, 2, 4, 5, 6, 7, 8, 9, 10, 11, 12, 13, 14, 15, 16, 17, 18, 19: /mod_base = "2'-hydroxy corresponding base"
auuaaagguugaucugggctt

SEQ ID NO: 153 - DNA, 21 bp, artificial sequence
  siRNA cross-reactive to human and rhesus monkey Eg5
  5'-terminal nucleic acid is a nucleoside, i.e. base + sugar but lacking 5'-phosphate
  modified_base 1, 2, 5, 6, 7, 10, 15: /mod_base = "2'-O-methyl corresponding base"
  modified_base 21: /mod_base = "5'-thio thymidine"
  modified_base 3, 4, 8, 9, 11, 12, 13, 14, 16, 17, 18, 19: /mod_base = "2'-hydroxy corresponding base"
uuaauuuggcagagcggaatt

SEQ ID NO: 154 - DNA, 21 bp, artificial sequence
  siRNA cross-reactive to human and rhesus monkey Eg5
  5'-terminal nucleic acid is a nucleoside, i.e. base + sugar but lacking 5'-phosphate
  modified_base 12, 17: /mod_base = "2'-O-methyl corresponding base"
  modified_base 21: /mod_base = "5'-thio thymidine"
  modified_base 1, 2, 3, 4, 5, 6, 7, 8, 9, 10, 11, 13, 14, 15, 16, 18, 19: /mod_base = "2'-hydroxy corresponding base"
uuccgcucugccaaauuaatt

SEQ ID NO: 155 - DNA, 21 bp, artificial sequence
  siRNA cross-reactive to human and rhesus monkey Eg5
  5'-terminal nucleic acid is a nucleoside, i.e. base + sugar but lacking 5'-phosphate
  modified_base 1, 2, 4, 5, 11, 12, 13, 17, 18: /mod_base = "2'-O-methyl corresponding base"
  modified_base 21: /mod_base = "5'-thio thymidine"
  modified_base 3, 6, 7, 8, 9, 10, 14, 15, 16, 19: /mod_base = "2'-hydroxy corresponding base"
uuaucgagaaucuaaacuatt

SEQ ID NO: 156 - DNA, 21 bp, artificial sequence
  siRNA cross-reactive to human and rhesus monkey Eg5
  5'-terminal nucleic acid is a nucleoside, i.e. base + sugar but lacking 5'-phosphate
  modified_base 1, 6, 17: /mod_base = "2'-O-methyl corresponding base"
  modified_base 21: /mod_base = "5'-thio thymidine"
  modified_base 2, 3, 4, 5, 7, 8, 9, 10, 11, 12, 13, 14, 15, 16, 18, 19: /mod_base = "2'-hydroxy corresponding base"
uaguuuagauucucgauaatt

SEQ ID NO: 157 - DNA, 21 bp, artificial sequence
  siRNA cross-reactive to human and rhesus monkey Eg5
  5'-terminal nucleic acid is a nucleoside, i.e. base + sugar but lacking 5'-phosphate
  modified_base 1, 2, 5, 7, 8, 9, 11, 12, 13, 16, 19: /mod_base = "2'-O-methyl corresponding base"
  modified_base 21: /mod_base = "5'-thio thymidine"
  modified_base 3, 4, 6, 10, 14, 15, 17, 18: /mod_base = "2'-hydroxy corresponding base"
cuagcgcccauucaauagutt

SEQ ID NO: 158 - DNA, 21 bp, artificial sequence
  siRNA cross-reactive to human and rhesus monkey Eg5
  5'-terminal nucleic acid is a nucleoside, i.e. base + sugar but lacking 5'-phosphate
  modified_base 3, 17: /mod_base = "2'-O-methyl corresponding base"
  modified_base 21: /mod_base = "5'-thio thymidine"
  modified_base 1, 2, 4, 5, 6, 7, 8, 9, 10, 11, 12, 13, 14, 15, 16, 18, 19: /mod_base = "2'-hydroxy corresponding base"
acuauugaaugggcgcuagtt

SEQ ID NO: 159 - DNA, 21 bp, artificial sequence
  siRNA cross-reactive to human and rhesus monkey Eg5
  5'-terminal nucleic acid is a nucleoside, i.e. base + sugar but lacking 5'-phosphate
  modified_base 3, 6, 11, 13, 16, 17, 18, 19: /mod_base = "2'-O-methyl corresponding base"
  modified_base 21: /mod_base = "5'-thio thymidine"
  modified_base 1, 2, 4, 5, 7, 8, 9, 10, 12, 14, 15: /mod_base = "2'-hydroxy corresponding base"
aauaguagaaugugauccutt

SEQ ID NO: 160 - DNA, 21 bp, artificial sequence
  siRNA cross-reactive to human and rhesus monkey Eg5
  5'-terminal nucleic acid is a nucleoside, i.e. base + sugar but lacking 5'-phosphate
  modified_base 6, 8, 13, 16: /mod_base = "2'-O-methyl corresponding base"
  modified_base 21: /mod_base = "5'-thio thymidine"
  modified_base 1, 2, 3, 4, 5, 7, 9, 10, 11, 12, 14, 15, 17, 18, 19: /mod_base = "2'-hydroxy corresponding base"
aggaucacauucuacuauutt

SEQ ID NO: 161 - DNA, 21 bp, artificial sequence
  siRNA cross-reactive to human and rhesus monkey Eg5
  5'-terminal nucleic acid is a nucleoside, i.e. base + sugar but lacking 5'-phosphate
  modified_base 1, 3, 13, 14, 17, 19: /mod_base = "2'-O-methyl corresponding base"
  modified_base 21: /mod_base = "5'-thio thymidine"
  modified_base 2, 4, 5, 6, 7, 8, 9, 10, 11, 12, 15, 16, 18: /mod_base = "2'-hydroxy corresponding base"
uacgaaaagaaguuagugutt

SEQ ID NO: 162 - DNA, 21 bp, artificial sequence
  siRNA cross-reactive to human and rhesus monkey Eg5
  5'-terminal nucleic acid is a nucleoside, i.e. base + sugar but lacking 5'-phosphate
  modified_base 2, 5, 18: /mod_base = "2'-O-methyl corresponding base"
  modified_base 21: /mod_base = "5'-thio thymidine"
  modified_base 1, 3, 4, 6, 7, 8, 9, 10, 11, 12, 13, 14, 15, 16, 17, 19: /mod_base = "2'-hydroxy corresponding base"
acacuaacuucuuuucguatt

SEQ ID NO: 163 - DNA, 21 bp, artificial sequence
  siRNA cross-reactive to human and rhesus monkey Eg5
  5'-terminal nucleic acid is a nucleoside, i.e. base + sugar but lacking 5'-phosphate
  modified_base 6, 7, 10, 12, 14, 18, 19: /mod_base = "2'-O-methyl corresponding base"
  modified_base 21: /mod_base = "5'-thio thymidine"
  modified_base 1, 2, 3, 4, 5, 8, 9, 11, 13, 15, 16, 17: /mod_base = "2'-hydroxy corresponding base"
agaaguuaguguacgaacutt

SEQ ID NO: 164 - DNA, 21 bp, artificial sequence
  siRNA cross-reactive to human and rhesus monkey Eg5
  5'-terminal nucleic acid is a nucleoside, i.e. base + sugar but lacking 5'-phosphate
  modified_base 7, 9, 12: /mod_base = "2'-O-methyl corresponding base"
  modified_base 21: /mod_base = "5'-thio thymidine"
  modified_base 1, 2, 3, 4, 5, 6, 8, 10, 11, 13, 14, 15, 16, 17, 18, 19: /mod_base = "2'-hydroxy corresponding base"
aguucguacacuaacuucutt

SEQ ID NO: 165 - DNA, 21 bp, artificial sequence
  siRNA cross-reactive to human and rhesus monkey Eg5
  5'-terminal nucleic acid is a nucleoside, i.e. base + sugar but lacking 5'-phosphate
  modified_base 2, 3, 7, 11, 12, 15, 17, 18, 19: /mod_base = "2'-O-methyl corresponding base"
  modified_base 21: /mod_base = "5'-thio thymidine"
  modified_base 1, 4, 5, 6, 8, 9, 10, 13, 14, 16: /mod_base = "2'-hydroxy corresponding base"
acuaaacagauugauguuutt

SEQ ID NO: 166 - DNA, 21 bp, artificial sequence
  siRNA cross-reactive to human and rhesus monkey Eg5
  5'-terminal nucleic acid is a nucleoside, i.e. base + sugar but lacking 5'-phosphate
  modified_base 4, 7, 16: /mod_base = "2'-O-methyl corresponding base"
  modified_base 21: /mod_base = "5'-thio thymidine"
  modified_base 1, 2, 3, 5, 6, 8, 9, 10, 11, 12, 13, 14, 15, 17, 18, 19: /mod_base = "2'-hydroxy corresponding base"
aaacaucaaucuguuuagutt

SEQ ID NO: 167 - DNA, 21 bp, artificial sequence
  siRNA cross-reactive to human and rhesus monkey Eg5
  5'-terminal nucleic acid is a nucleoside, i.e. base + sugar but lacking 5'-phosphate
  modified_base 1, 2, 3, 4, 6, 8, 10, 13, 14, 18, 19: /mod_base = "2'-O-methyl corresponding base"
  modified_base 21: /mod_base = "5'-thio thymidine"
  modified_base 5, 7, 9, 11, 12, 15, 16, 17: /mod_base = "2'-hydroxy corresponding base"
cuuugcguauggccaaacutt

SEQ ID NO: 168 - DNA, 21 bp, artificial sequence
  siRNA cross-reactive to human and rhesus monkey Eg5
  5'-terminal nucleic acid is a nucleoside, i.e. base + sugar but lacking 5'-phosphate
  modified_base 9, 11, 15: /mod_base = "2'-O-methyl corresponding base"
  modified_base 21: /mod_base = "5'-thio thymidine"
  modified_base 1, 2, 3, 4, 5, 6, 7, 8, 10, 12, 13, 14, 16, 17, 18, 19: /mod_base = "2'-hydroxy corresponding base"
aguuuggccauacgcaaagtt

SEQ ID NO: 169 - DNA, 21 bp, artificial sequence
  siRNA cross-reactive to human and rhesus monkey Eg5
  5'-terminal nucleic acid is a nucleoside, i.e. base + sugar but lacking 5'-phosphate
  modified_base 3, 10, 12, 14, 15, 16: /mod_base = "2'-O-methyl corresponding base"
  modified_base 21: /mod_base = "5'-thio thymidine"
  modified_base 1, 2, 4, 5, 6, 7, 8, 9, 11, 13, 17, 18, 19: /mod_base = "2'-hydroxy corresponding base"
aaugaagaguauaccugggtt

SEQ ID NO: 170 - DNA, 21 bp, artificial sequence
  siRNA cross-reactive to human and rhesus monkey Eg5
  5'-terminal nucleic acid is a nucleoside, i.e. base + sugar but lacking 5'-phosphate
  modified_base 3, 7, 9, 16: /mod_base = "2'-O-methyl corresponding base"
  modified_base 21: /mod_base = "5'-thio thymidine"
  modified_base 1, 2, 4, 5, 6, 8, 10, 11, 12, 13, 14, 15, 17, 18, 19: /mod_base = "2'-hydroxy corresponding base"
cccagguauacucuucauutt

SEQ ID NO: 171 - DNA, 21 bp, artificial sequence
  siRNA cross-reactive to human and rhesus monkey Eg5
  5'-terminal nucleic acid is a nucleoside, i.e. base + sugar but lacking 5'-phosphate
  modified_base 2, 5, 6, 7, 8, 10, 12, 14, 15, 16, 17, 18, 19: /mod_base = "2'-O-methyl corresponding base"
  modified_base 21: /mod_base = "5'-thio thymidine"
  modified_base 1, 3, 4, 9, 11, 13: /mod_base = "2'-hydroxy corresponding base"
auaauuccacguacccuuctt

SEQ ID NO: 172 - DNA, 21 bp, artificial sequence
  siRNA cross-reactive to human and rhesus monkey Eg5
  5'-terminal nucleic acid is a nucleoside, i.e. base + sugar but lacking 5'-phosphate
  modified_base 7, 17: /mod_base = "2'-O-methyl corresponding base"
  modified_base 21: /mod_base = "5'-thio thymidine"
  modified_base 1, 2, 3, 4, 5, 6, 8, 9, 10, 11, 12, 13, 14, 15, 16, 18, 19: /mod_base = "2'-hydroxy corresponding base"
gaaggguacguggaauuautt

SEQ ID NO: 173 - DNA, 21 bp, artificial sequence
  siRNA cross-reactive to human and rhesus monkey Eg5
  5'-terminal nucleic acid is a nucleoside, i.e. base + sugar but lacking 5'-phosphate
  modified_base 2, 4, 6, 7, 8, 9, 10, 11, 13, 14, 18, 19: /mod_base = "2'-O-methyl corresponding base"
  modified_base 21: /mod_base = "5'-thio thymidine"
  modified_base 1, 3, 5, 12, 15, 16, 17: /mod_base = "2'-hydroxy corresponding base"
acguacccuucaucaaauutt

SEQ ID NO: 174 - DNA, 21 bp, artificial sequence
  siRNA cross-reactive to human and rhesus monkey Eg5
  5'-terminal nucleic acid is a nucleoside, i.e. base + sugar but lacking 5'-phosphate
  modified_base 15: /mod_base = "2'-O-methyl corresponding base"
  modified_base 21: /mod_base = "5'-thio thymidine"
  modified_base 1, 2, 3, 4, 5, 6, 7, 8, 9, 10, 11, 12, 13, 14, 16, 17, 18, 19: /mod_base = "2'-hydroxy corresponding base"
aauuugaugaaggguacgutt

SEQ ID NO: 175 - DNA, 21 bp, artificial sequence
  siRNA cross-reactive to human and rhesus monkey Eg5
  5'-terminal nucleic acid is a nucleoside, i.e. base + sugar but lacking 5'-phosphate
  modified_base 1, 3, 5, 6, 7, 8, 9, 10, 12, 13, 17, 18, 19: /mod_base = "2'-O-methyl corresponding base"
  modified_base 21: /mod_base = "5'-thio thymidine"
  modified_base 2, 4, 11, 14, 15, 16: /mod_base = "2'-hydroxy corresponding base"
cguacccuucaucaaauuutt

SEQ ID NO: 176 - DNA, 21 bp, artificial sequence
  siRNA cross-reactive to human and rhesus monkey Eg5
  5'-terminal nucleic acid is a nucleoside, i.e. base + sugar but lacking 5'-phosphate
  modified_base 16: /mod_base = "2'-O-methyl corresponding base"
  modified_base 21: /mod_base = "5'-thio thymidine"
  modified_base 1, 2, 3, 4, 5, 6, 7, 8, 9, 10, 11, 12, 13, 14, 15, 17, 18, 19: /mod_base = "2'-hydroxy corresponding base"
aaauuugaugaaggguacgtt

SEQ ID NO: 177 - DNA, 21 bp, artificial sequence
  siRNA cross-reactive to human and rhesus monkey Eg5
  5'-terminal nucleic acid is a nucleoside, i.e. base + sugar but lacking 5'-phosphate
  modified_base 2, 4, 5, 6, 7, 8, 9, 11, 12, 16, 17, 18, 19: /mod_base = "2'-O-methyl corresponding base"
  modified_base 21: /mod_base = "5'-thio thymidine"
  modified_base 1, 3, 10, 13, 14, 15: /mod_base = "2'-hydroxy corresponding base"
guacccuucaucaaauuuutt

SEQ ID NO: 178 - DNA, 21 bp, artificial sequence
  siRNA cross-reactive to human and rhesus monkey Eg5
  5'-terminal nucleic acid is a nucleoside, i.e. base + sugar but lacking 5'-phosphate
  modified_base 17: /mod_base = "2'-O-methyl corresponding base"
  modified_base 21: /mod_base = "5'-thio thymidine"
  modified_base 1, 2, 3, 4, 5, 6, 7, 8, 9, 10, 11, 12, 13, 14, 15, 16, 18, 19: /mod_base = "2'-hydroxy corresponding base"
aaaauuugaugaaggguactt

SEQ ID NO: 179 - DNA, 21 bp, artificial sequence
  siRNA cross-reactive to human and rhesus monkey Eg5
  5'-terminal nucleic acid is a nucleoside, i.e. base + sugar but lacking 5'-phosphate
  modified_base 3, 4, 5, 7, 8, 11, 14, 17, 19: /mod_base = "2'-O-methyl corresponding base"
  modified_base 21: /mod_base = "5'-thio thymidine"
  modified_base 1, 2, 6, 9, 10, 12, 13, 15, 16, 18: /mod_base = "2'-hydroxy corresponding base"
aacuuacugauaaugguactt

SEQ ID NO: 180 - DNA, 21 bp, artificial sequence
  siRNA cross-reactive to human and rhesus monkey Eg5
  5'-terminal nucleic acid is a nucleoside, i.e. base + sugar but lacking 5'-phosphate
  modified_base 2, 5, 8, 11, 14: /mod_base = "2'-O-methyl corresponding base"
  modified_base 21: /mod_base = "5'-thio thymidine"
  modified_base 1, 3, 4, 6, 7, 9, 10, 12, 13, 15, 16, 17, 18, 19: /mod_base = "2'-hydroxy corresponding base"
guaccauuaucaguaaguutt

SEQ ID NO: 181 - DNA, 21 bp, artificial sequence
  siRNA cross-reactive to human and rhesus monkey Eg5
  5'-terminal nucleic acid is a nucleoside, i.e. base + sugar but lacking 5'-phosphate
  modified_base 1, 2, 3, 6, 7, 12, 14, 15, 16, 17, 18: /mod_base = "2'-O-methyl corresponding base"
  modified_base 21: /mod_base = "5'-thio thymidine"
  modified_base 4, 5, 8, 9, 10, 11, 13, 19: /mod_base = "2'-hydroxy corresponding base"
uucagucaaagugucucugtt

SEQ ID NO: 182 - DNA, 21 bp, artificial sequence
  siRNA cross-reactive to human and rhesus monkey Eg5
  5'-terminal nucleic acid is a nucleoside, i.e. base + sugar but lacking 5'-phosphate
  modified_base 1, 7: /mod_base = "2'-O-methyl corresponding base"
  modified_base 21: /mod_base = "5'-thio thymidine"
  modified_base 2, 3, 4, 5, 6, 8, 9, 10, 11, 12, 13, 14, 15, 16, 17, 18, 19: /mod_base = "2'-hydroxy corresponding base"
cagagacacuuugacugaatt

SEQ ID NO: 183 - DNA, 21 bp, artificial sequence
  siRNA cross-reactive to human and rhesus monkey Eg5
  5'-terminal nucleic acid is a nucleoside, i.e. base + sugar but lacking 5'-phosphate
  modified_base 1, 2, 3, 4, 5, 8, 9, 10, 12, 13, 15, 16, 17: /mod_base = "2'-O-methyl corresponding base"
  modified_base 21: /mod_base = "5'-thio thymidine"
  modified_base 6, 7, 11, 14, 18, 19: /mod_base = "2'-hydroxy corresponding base"
uucuuaauccaucaucugatt

SEQ ID NO: 184 - DNA, 21 bp, artificial sequence
  siRNA cross-reactive to human and rhesus monkey Eg5
  5'-terminal nucleic acid is a nucleoside, i.e. base + sugar but lacking 5'-phosphate
  modified_base 2, 14: /mod_base = "2'-O-methyl corresponding base"
  modified_base 21: /mod_base = "5'-thio thymidine"
  modified_base 1, 3, 4, 5, 6, 7, 8, 9, 10, 11, 12, 13, 15, 16, 17, 18, 19: /mod_base = "2'-hydroxy corresponding base"
ucagaugauggauuaagaatt

SEQ ID NO: 185 - DNA, 21 bp, artificial sequence
  siRNA cross-reactive to human and rhesus monkey Eg5
  5'-terminal nucleic acid is a nucleoside, i.e. base + sugar but lacking 5'-phosphate
  modified_base 2, 5, 7, 9, 12, 18: /mod_base = "2'-O-methyl corresponding base"
  modified_base 21: /mod_base = "5'-thio thymidine"
  modified_base 1, 3, 4, 6, 8, 10, 11, 13, 14, 15, 16, 17, 19: /mod_base = "2'-hydroxy corresponding base"
acaguacacaacaaggaugtt

SEQ ID NO: 186 - DNA, 21 bp, artificial sequence
  siRNA cross-reactive to human and rhesus monkey Eg5
  5'-terminal nucleic acid is a nucleoside, i.e. base + sugar but lacking 5'-phosphate
  modified_base 1, 14: /mod_base = "2'-O-methyl corresponding base"
  modified_base 21: /mod_base = "5'-thio thymidine"
  modified_base 2, 3, 4, 5, 6, 7, 8, 9, 10, 11, 12, 13, 15, 16, 17, 18, 19: /mod_base = "2'-hydroxy corresponding base"
cauccuuguuguguacugutt

SEQ ID NO: 187 - DNA, 21 bp, artificial sequence
  siRNA cross-reactive to human and rhesus monkey Eg5
  5'-terminal nucleic acid is a nucleoside, i.e. base + sugar but lacking 5'-phosphate
  modified_base 7, 8, 10, 13, 14, 17: /mod_base = "2'-O-methyl corresponding base"
  modified_base 21: /mod_base = "5'-thio thymidine"
  modified_base 1, 2, 3, 4, 5, 6, 9, 11, 12, 15, 16, 18, 19: /mod_base = "2'-hydroxy corresponding base"
aagaaacuacgauugauggtt

SEQ ID NO: 188 - DNA, 21 bp, artificial sequence
  siRNA cross-reactive to human and rhesus monkey Eg5
  5'-terminal nucleic acid is a nucleoside, i.e. base + sugar but lacking 5'-phosphate
  modified_base 2, 5, 11: /mod_base = "2'-O-methyl corresponding base"
  modified_base 21: /mod_base = "5'-thio thymidine"
  modified_base 1, 3, 4, 6, 7, 8, 9, 10, 12, 13, 14, 15, 16, 17, 18, 19: /mod_base = "2'-hydroxy corresponding base"
ccaucaaucguaguuucuutt

SEQ ID NO: 189 - DNA, 21 bp, artificial sequence
  siRNA cross-reactive to human and rhesus monkey Eg5
  5'-terminal nucleic acid is a nucleoside, i.e. base + sugar but lacking 5'-phosphate
  modified_base 4, 5, 7, 10, 11, 14: /mod_base = "2'-O-methyl corresponding base"
  modified_base 21: /mod_base = "5'-thio thymidine"
  modified_base 1, 2, 3, 6, 8, 9, 12, 13, 15, 16, 17, 18, 19: /mod_base = "2'-hydroxy corresponding base"
aaacuacgauugauggagatt

SEQ ID NO: 190 - DNA, 21 bp, artificial sequence
  siRNA cross-reactive to human and rhesus monkey Eg5
  5'-terminal nucleic acid is a nucleoside, i.e. base + sugar but lacking 5'-phosphate
  modified_base 5, 8, 14: /mod_base = "2'-O-methyl corresponding base"
  modified_base 21: /mod_base = "5'-thio thymidine"
  modified_base 1, 2, 3, 4, 6, 7, 9, 10, 11, 12, 13, 15, 16, 17, 18, 19: /mod_base = "2'-hydroxy corresponding base"
ucuccaucaaucguaguuutt

SEQ ID NO: 191 - DNA, 21 bp, artificial sequence
  siRNA cross-reactive to human and rhesus monkey Eg5
  5'-terminal nucleic acid is a nucleoside, i.e. base + sugar but lacking 5'-phosphate
  modified_base 1, 6, 7, 9, 10, 13: /mod_base = "2'-O-methyl corresponding base"
  modified_base 21: /mod_base = "5'-thio thymidine"
  modified_base 2, 3, 4, 5, 8, 11, 12, 14, 15, 16, 17, 18, 19: /mod_base = "2'-hydroxy corresponding base"
uggagcuguugauaagagatt

SEQ ID NO: 192 - DNA, 21 bp, artificial sequence
  siRNA cross-reactive to human and rhesus monkey Eg5
  5'-terminal nucleic acid is a nucleoside, i.e. base + sugar but lacking 5'-phosphate
  modified_base 6, 9, 12, 18: /mod_base = "2'-O-methyl corresponding base"
  modified_base 21: /mod_base = "5'-thio thymidine"
  modified_base 1, 2, 3, 4, 5, 7, 8, 10, 11, 13, 14, 15, 16, 17, 19: /mod_base = "2'-hydroxy corresponding base"
ucucuuaucaacagcuccatt

SEQ ID NO: 193 - DNA, 21 bp, artificial sequence
  siRNA cross-reactive to human and rhesus monkey Eg5
  5'-terminal nucleic acid is a nucleoside, i.e. base + sugar but lacking 5'-phosphate
  modified_base 1, 2, 5, 6, 11, 12, 13, 14, 15, 16: /mod_base = "2'-O-methyl corresponding base"
  modified_base 21: /mod_base = "5'-thio thymidine"
  modified_base 3, 4, 7, 8, 9, 10, 17, 18, 19: /mod_base = "2'-hydroxy corresponding base"
cuaacuagaauccuccaggtt

SEQ ID NO: 194 - DNA, 21 bp, artificial sequence
  siRNA cross-reactive to human and rhesus monkey Eg5
  5'-terminal nucleic acid is a nucleoside, i.e. base + sugar but lacking 5'-phosphate
  modified_base 13, 17: /mod_base = "2'-O-methyl corresponding base"
  modified_base 21: /mod_base = "5'-thio thymidine"
  modified_base 1, 2, 3, 4, 5, 6, 7, 8, 9, 10, 11, 12, 14, 15, 16, 18, 19: /mod_base = "2'-hydroxy corresponding base"
ccuggaggauucuaguuagtt

SEQ ID NO: 195 - DNA, 21 bp, artificial sequence
  siRNA cross-reactive to human and rhesus monkey Eg5
  5'-terminal nucleic acid is a nucleoside, i.e. base + sugar but lacking 5'-phosphate
  modified_base 4, 6, 8, 9, 10, 12, 17: /mod_base = "2'-O-methyl corresponding base"
  modified_base 21: /mod_base = "5'-thio thymidine"
  modified_base 1, 2, 3, 5, 7, 11, 13, 14, 15, 16, 18, 19: /mod_base = "2'-hydroxy corresponding base"
gaauaugcucauagagcaatt

SEQ ID NO: 196 - DNA, 21 bp, artificial sequence
  siRNA cross-reactive to human and rhesus monkey Eg5
  5'-terminal nucleic acid is a nucleoside, i.e. base + sugar but lacking 5'-phosphate
  modified_base 7, 13, 15: /mod_base = "2'-O-methyl corresponding base"
  modified_base 21: /mod_base = "5'-thio thymidine"
  modified_base 1, 2, 3, 4, 5, 6, 8, 9, 10, 11, 12, 14, 16, 17, 18, 19: /mod_base = "2'-hydroxy corresponding base"
uugcucuaugagcauauuctt

SEQ ID NO: 197 - DNA, 21 bp, artificial sequence
  siRNA cross-reactive to human and rhesus monkey Eg5
  5'-terminal nucleic acid is a nucleoside, i.e. base + sugar but lacking 5'-phosphate
  modified_base 2, 4, 5, 6, 8, 13: /mod_base = "2'-O-methyl corresponding base"
  modified_base 21: /mod_base = "5'-thio thymidine"
  modified_base 1, 3, 7, 9, 10, 11, 12, 14, 15, 16, 17, 18, 19: /mod_base = "2'-hydroxy corresponding base"
augcucauagagcaaagaatt

SEQ ID NO: 198 - DNA, 21 bp, artificial sequence
  siRNA cross-reactive to human and rhesus monkey Eg5
  5'-terminal nucleic acid is a nucleoside, i.e. base + sugar but lacking 5'-phosphate
  modified_base 11, 17: /mod_base = "2'-O-methyl corresponding base"
  modified_base 21: /mod_base = "5'-thio thymidine"
  modified_base 1, 2, 3, 4, 5, 6, 7, 8, 9, 10, 12, 13, 14, 15, 16, 18, 19: /mod_base = "2'-hydroxy corresponding base"
uucuuugcucuaugagcautt

SEQ ID NO: 199 - DNA, 21 bp, artificial sequence
  siRNA cross-reactive to human and rhesus monkey Eg5
  5'-terminal nucleic acid is a nucleoside, i.e. base + sugar but lacking 5'-phosphate
  modified_base 6, 7, 10, 12, 13, 15, 16: /mod_base = "2'-O-methyl corresponding base"
  modified_base 21: /mod_base = "5'-thio thymidine"
  modified_base 1, 2, 3, 4, 5, 8, 9, 11, 14, 17, 18, 19: /mod_base = "2'-hydroxy corresponding base"
aaaaauuggugcuguugagtt

SEQ ID NO: 200 - DNA, 21 bp, artificial sequence
  siRNA cross-reactive to human and rhesus monkey Eg5
  5'-terminal nucleic acid is a nucleoside, i.e. base + sugar but lacking 5'-phosphate
  modified_base 3, 6, 9, 12: /mod_base = "2'-O-methyl corresponding base"
  modified_base 21: /mod_base = "5'-thio thymidine"
  modified_base 1, 2, 4, 5, 7, 8, 10, 11, 13, 14, 15, 16, 17, 18, 19: /mod_base = "2'-hydroxy corresponding base"
cucaacagcaccaauuuuutt

SEQ ID NO: 201 - DNA, 21 bp, artificial sequence
  siRNA cross-reactive to human and rhesus monkey Eg5
  5'-terminal nucleic acid is a nucleoside, i.e. base + sugar but lacking 5'-phosphate
  modified_base 7, 8, 12, 17, 18: /mod_base = "2'-O-methyl corresponding base"
  modified_base 21: /mod_base = "5'-thio thymidine"
  modified_base 1, 2, 3, 4, 5, 6, 9, 10, 11, 13, 14, 15, 16, 19: /mod_base = "2'-hydroxy corresponding base"
gaggagcugaauaggguuatt

SEQ ID NO: 202 - DNA, 21 bp, artificial sequence
  siRNA cross-reactive to human and rhesus monkey Eg5
  5'-terminal nucleic acid is a nucleoside, i.e. base + sugar but lacking 5'-phosphate
  modified_base 1, 7, 11: /mod_base = "2'-O-methyl corresponding base"
  modified_base 21: /mod_base = "5'-thio thymidine"
  modified_base 2, 3, 4, 5, 6, 8, 9, 10, 12, 13, 14, 15, 16, 17, 18, 19: /mod_base = "2'-hydroxy corresponding base"
uaacccuauucagcuccuctt

SEQ ID NO: 203 - DNA, 21 bp, artificial sequence
  siRNA cross-reactive to human and rhesus monkey Eg5
  5'-terminal nucleic acid is a nucleoside, i.e. base + sugar but lacking 5'-phosphate
  modified_base 5, 6, 10, 15, 16, 18: /mod_base = "2'-O-methyl corresponding base"
  modified_base 21: /mod_base = "5'-thio thymidine"
  modified_base 1, 2, 3, 4, 7, 8, 9, 11, 12, 13, 14, 17, 19: /mod_base = "2'-hydroxy corresponding base"
ggagcugaauaggguuacatt

SEQ ID NO: 204 - DNA, 21 bp, artificial sequence
  siRNA cross-reactive to human and rhesus monkey Eg5
  5'-terminal nucleic acid is a nucleoside, i.e. base + sugar but lacking 5'-phosphate
  modified_base 3, 9, 13: /mod_base = "2'-O-methyl corresponding base"
  modified_base 21: /mod_base = "5'-thio thymidine"
  modified_base 1, 2, 4, 5, 6, 7, 8, 10, 11, 12, 14, 15, 16, 17, 18, 19: /mod_base = "2'-hydroxy corresponding base"
uguaacccuauucagcucctt

SEQ ID NO: 205 - DNA, 21 bp, artificial sequence
  siRNA cross-reactive to human and rhesus monkey Eg5
  5'-terminal nucleic acid is a nucleoside, i.e. base + sugar but lacking 5'-phosphate
  modified_base 4, 5, 9, 14, 15, 17: /mod_base = "2'-O-methyl corresponding base"
  modified_base 21: /mod_base = "5'-thio thymidine"
  modified_base 1, 2, 3, 6, 7, 8, 10, 11, 12, 13, 16, 18, 19: /mod_base = "2'-hydroxy corresponding base"
gagcugaauaggguuacagtt

SEQ ID NO: 206 - DNA, 21 bp, artificial sequence
  siRNA cross-reactive to human and rhesus monkey Eg5
  5'-terminal nucleic acid is a nucleoside, i.e. base + sugar but lacking 5'-phosphate
  modified_base 4, 10, 14: /mod_base = "2'-O-methyl corresponding base"
  modified_base 21: /mod_base = "5'-thio thymidine"
  modified_base 1, 2, 3, 5, 6, 7, 8, 9, 11, 12, 13, 15, 16, 17, 18, 19: /mod_base = "2'-hydroxy corresponding base"
cuguaacccuauucagcuctt

SEQ ID NO: 207 - DNA, 21 bp, artificial sequence
  siRNA cross-reactive to human and rhesus monkey Eg5
  5'-terminal nucleic acid is a nucleoside, i.e. base + sugar but lacking 5'-phosphate
  modified_base 3, 4, 8, 13, 14, 16: /mod_base = "2'-O-methyl corresponding base"
  modified_base 21: /mod_base = "5'-thio thymidine"
  modified_base 1, 2, 5, 6, 7, 9, 10, 11, 12, 15, 17, 18, 19: /mod_base = "2'-hydroxy corresponding base"
agcugaauaggguuacagatt

SEQ ID NO: 208 - DNA, 21 bp, artificial sequence
  siRNA cross-reactive to human and rhesus monkey Eg5
  5'-terminal nucleic acid is a nucleoside, i.e. base + sugar but lacking 5'-phosphate
  modified_base 5, 11, 15: /mod_base = "2'-O-methyl corresponding base"
  modified_base 21: /mod_base = "5'-thio thymidine"
  modified_base 1, 2, 3, 4, 6, 7, 8, 9, 10, 12, 13, 14, 16, 17, 18, 19: /mod_base = "2'-hydroxy corresponding base"
ucuguaacccuauucagcutt

SEQ ID NO: 209 - DNA, 21 bp, artificial sequence
  siRNA cross-reactive to human and rhesus monkey Eg5
  5'-terminal nucleic acid is a nucleoside, i.e. base + sugar but lacking 5'-phosphate
  modified_base 2, 3, 7, 12, 13, 15: /mod_base = "2'-O-methyl corresponding base"
  modified_base 21: /mod_base = "5'-thio thymidine"
  modified_base 1, 4, 5, 6, 8, 9, 10, 11, 14, 16, 17, 18, 19: /mod_base = "2'-hydroxy corresponding base"
gcugaauaggguuacagagtt

SEQ ID NO: 210 - DNA, 21 bp, artificial sequence
  siRNA cross-reactive to human and rhesus monkey Eg5
  5'-terminal nucleic acid is a nucleoside, i.e. base + sugar but lacking 5'-phosphate
  modified_base 6, 12, 16: /mod_base = "2'-O-methyl corresponding base"
  modified_base 21: /mod_base = "5'-thio thymidine"
  modified_base 1, 2, 3, 4, 5, 7, 8, 9, 10, 11, 13, 14, 15, 17, 18, 19: /mod_base = "2'-hydroxy corresponding base"
cucuguaacccuauucagctt

SEQ ID NO: 211 - DNA, 21 bp, artificial sequence
  siRNA cross-reactive to human and rhesus monkey Eg5
  5'-terminal nucleic acid is a nucleoside, i.e. base + sugar but lacking 5'-phosphate
  modified_base 1, 2, 6, 7, 11, 12, 14: /mod_base = "2'-O-methyl corresponding base"
  modified_base 21: /mod_base = "5'-thio thymidine"
  modified_base 3, 4, 5, 8, 9, 10, 13, 15, 16, 17, 18, 19: /mod_base = "2'-hydroxy corresponding base"
ccaaacuggaucguaagaatt

SEQ ID NO: 212 - DNA, 21 bp, artificial sequence
  siRNA cross-reactive to human and rhesus monkey Eg5
  5'-terminal nucleic acid is a nucleoside, i.e. base + sugar but lacking 5'-phosphate
  modified_base 5, 12: /mod_base = "2'-O-methyl corresponding base"
  modified_base 21: /mod_base = "5'-thio thymidine"
  modified_base 1, 2, 3, 4, 6, 7, 8, 9, 10, 11, 13, 14, 15, 16, 17, 18, 19: /mod_base = "2'-hydroxy corresponding base"
uucuuacgauccaguuuggtt

SEQ ID NO: 213 - DNA, 21 bp, artificial sequence
  siRNA cross-reactive to human and rhesus monkey Eg5
  5'-terminal nucleic acid is a nucleoside, i.e. base + sugar but lacking 5'-phosphate
  modified_base 3, 4, 6, 14, 17, 18: /mod_base = "2'-O-methyl corresponding base"
  modified_base 21: /mod_base = "5'-thio thymidine"
  modified_base 1, 2, 5, 7, 8, 9, 10, 11, 12, 13, 15, 16, 19: /mod_base = "2'-hydroxy corresponding base"
gaucguaagaaggcaguugtt

SEQ ID NO: 214 - DNA, 21 bp, artificial sequence
  siRNA cross-reactive to human and rhesus monkey Eg5
  5'-terminal nucleic acid is a nucleoside, i.e. base + sugar but lacking 5'-phosphate
  modified_base 1, 13: /mod_base = "2'-O-methyl corresponding base"
  modified_base 21: /mod_base = "5'-thio thymidine"
  modified_base 2, 3, 4, 5, 6, 7, 8, 9, 10, 11, 12, 14, 15, 16, 17, 18, 19: /mod_base = "2'-hydroxy corresponding base"
caacugccuucuuacgauctt

SEQ ID NO: 215 - DNA, 21 bp, artificial sequence
  siRNA cross-reactive to human and rhesus monkey Eg5
  5'-terminal nucleic acid is a nucleoside, i.e. base + sugar but lacking 5'-phosphate
  modified_base 2, 3, 4, 5, 7, 8, 9, 12, 15, 16, 17, 19: /mod_base = "2'-O-methyl corresponding base"
  modified_base 21: /mod_base = "5'-thio thymidine"
  modified_base 1, 6, 10, 11, 13, 14, 18: /mod_base = "2'-hydroxy corresponding base"
accuuauuugguaaucugctt

SEQ ID NO: 216 - DNA, 21 bp, artificial sequence
  siRNA cross-reactive to human and rhesus monkey Eg5
  5'-terminal nucleic acid is a nucleoside, i.e. base + sugar but lacking 5'-phosphate
  modified_base 2, 7, 10, 14: /mod_base = "2'-O-methyl corresponding base"
  modified_base 21: /mod_base = "5'-thio thymidine"
  modified_base 1, 3, 4, 5, 6, 8, 9, 11, 12, 13, 15, 16, 17, 18, 19: /mod_base = "2'-hydroxy corresponding base"
gcagauuaccaaauaaggutt

SEQ ID NO: 217 - DNA, 21 bp, artificial sequence
  siRNA cross-reactive to human and rhesus monkey Eg5
  5'-terminal nucleic acid is a nucleoside, i.e. base + sugar but lacking 5'-phosphate
  modified_base 1, 2, 6, 8, 9, 11, 12, 14, 15, 17: /mod_base = "2'-O-methyl corresponding base"
  modified_base 21: /mod_base = "5'-thio thymidine"
  modified_base 3, 4, 5, 7, 10, 13, 16, 18, 19: /mod_base = "2'-hydroxy corresponding base"
uuagauaccauuacuacagtt

SEQ ID NO: 218 - DNA, 21 bp, artificial sequence
  siRNA cross-reactive to human and rhesus monkey Eg5
  5'-terminal nucleic acid is a nucleoside, i.e. base + sugar but lacking 5'-phosphate
  modified_base 4, 7, 13, 17: /mod_base = "2'-O-methyl corresponding base"
  modified_base 21: /mod_base = "5'-thio thymidine"
  modified_base 1, 2, 3, 5, 6, 8, 9, 10, 11, 12, 14, 15, 16, 18, 19: /mod_base = "2'-hydroxy corresponding base"
cuguaguaaugguaucuaatt

SEQ ID NO: 219 - DNA, 21 bp, artificial sequence
  siRNA cross-reactive to human and rhesus monkey Eg5
  5'-terminal nucleic acid is a nucleoside, i.e. base + sugar but lacking 5'-phosphate
  modified_base 2, 4, 5, 7, 8, 10, 11, 13, 16, 19: /mod_base = "2'-O-methyl corresponding base"
  modified_base 21: /mod_base = "5'-thio thymidine"
  modified_base 1, 3, 6, 9, 12, 14, 15, 17, 18: /mod_base = "2'-hydroxy corresponding base"
auaccauuacuacaguagctt

SEQ ID NO: 220 - DNA, 21 bp, artificial sequence
  siRNA cross-reactive to human and rhesus monkey Eg5
  5'-terminal nucleic acid is a nucleoside, i.e. base + sugar but lacking 5'-phosphate
  modified_base 3, 8, 11, 17: /mod_base = "2'-O-methyl corresponding base"
  modified_base 21: /mod_base = "5'-thio thymidine"
  modified_base 1, 2, 4, 5, 6, 7, 9, 10, 12, 13, 14, 15, 16, 18, 19: /mod_base = "2'-hydroxy corresponding base"
gcuacuguaguaaugguautt

SEQ ID NO: 221 - DNA, 21 bp, artificial sequence
  siRNA cross-reactive to human and rhesus monkey Eg5
  5'-terminal nucleic acid is a nucleoside, i.e. base + sugar but lacking 5'-phosphate
  modified_base 1, 3, 4, 6, 9, 12, 14, 15, 16: /mod_base = "2'-O-methyl corresponding base"
  modified_base 21: /mod_base = "5'-thio thymidine"
  modified_base 2, 5, 7, 8, 10, 11, 13, 17, 18, 19: /mod_base = "2'-hydroxy corresponding base"
uacuacaguagcacuuggatt

SEQ ID NO: 222 - DNA, 21 bp, artificial sequence
  siRNA cross-reactive to human and rhesus monkey Eg5
  5'-terminal nucleic acid is a nucleoside, i.e. base + sugar but lacking 5'-phosphate
  modified_base 3, 10, 15, 18: /mod_base = "2'-O-methyl corresponding base"
  modified_base 21: /mod_base = "5'-thio thymidine"
  modified_base 1, 2, 4, 5, 6, 7, 8, 9, 11, 12, 13, 14, 16, 17, 19: /mod_base = "2'-hydroxy corresponding base"
uccaagugcuacuguaguatt

SEQ ID NO: 223 - DNA, 21 bp, artificial sequence
  siRNA cross-reactive to human and rhesus monkey Eg5
  5'-terminal nucleic acid is a nucleoside, i.e. base + sugar but lacking 5'-phosphate
  modified_base 5, 10, 11, 13, 15, 16, 18: /mod_base = "2'-O-methyl corresponding base"
  modified_base 21: /mod_base = "5'-thio thymidine"
  modified_base 1, 2, 3, 4, 6, 7, 8, 9, 12, 14, 17, 19: /mod_base = "2'-hydroxy corresponding base"
aaaguaaaacuguacuacatt

SEQ ID NO: 224 - DNA, 21 bp, artificial sequence
  siRNA cross-reactive to human and rhesus monkey Eg5
  5'-terminal nucleic acid is a nucleoside, i.e. base + sugar but lacking 5'-phosphate
  modified_base 3, 6, 8, 14: /mod_base = "2'-O-methyl corresponding base"
  modified_base 21: /mod_base = "5'-thio thymidine"
  modified_base 1, 2, 4, 5, 7, 9, 10, 11, 12, 13, 15, 16, 17, 18, 19: /mod_base = "2'-hydroxy corresponding base"
uguaguacaguuuuacuuutt

SEQ ID NO: 225 - DNA, 21 bp, artificial sequence
  siRNA cross-reactive to human and rhesus monkey Eg5
  5'-terminal nucleic acid is a nucleoside, i.e. base + sugar but lacking 5'-phosphate
  modified_base 1, 2, 3, 8, 9, 12, 13, 14, 15, 16, 17: /mod_base = "2'-O-methyl corresponding base"
  modified_base 21: /mod_base = "5'-thio thymidine"
  modified_base 4, 5, 6, 7, 10, 11, 18, 19: /mod_base = "2'-hydroxy corresponding base"
cucaagacugaucuucuaatt

SEQ ID NO: 226 - DNA, 21 bp, artificial sequence
  siRNA cross-reactive to human and rhesus monkey Eg5
  5'-terminal nucleic acid is a nucleoside, i.e. base + sugar but lacking 5'-phosphate
  modified_base 2, 10: /mod_base = "2'-O-methyl corresponding base"
  modified_base 21: /mod_base = "5'-thio thymidine"
  modified_base 1, 3, 4, 5, 6, 7, 8, 9, 11, 12, 13, 14, 15, 16, 17, 18, 19: /mod_base = "2'-hydroxy corresponding base"
uuagaagaucagucuugagtt

SEQ ID NO: 227 - DNA, 21 bp, artificial sequence
  siRNA cross-reactive to human and rhesus monkey Eg5
  5'-terminal nucleic acid is a nucleoside, i.e. base + sugar but lacking 5'-phosphate
  modified_base 1, 2, 5, 8, 11, 12, 15: /mod_base = "2'-O-methyl corresponding base"
  modified_base 21: /mod_base = "5'-thio thymidine"
  modified_base 3, 4, 6, 7, 9, 10, 13, 14, 16, 17, 18, 19: /mod_base = "2'-hydroxy corresponding base"
uugacaguggccgauaagatt

SEQ ID NO: 228 - DNA, 21 bp, artificial sequence
  siRNA cross-reactive to human and rhesus monkey Eg5
  5'-terminal nucleic acid is a nucleoside, i.e. base + sugar but lacking 5'-phosphate
  modified_base 4, 11, 17: /mod_base = "2'-O-methyl corresponding base"
  modified_base 21: /mod_base = "5'-thio thymidine"
  modified_base 1, 2, 3, 5, 6, 7, 8, 9, 10, 12, 13, 14, 15, 16, 18, 19: /mod_base = "2'-hydroxy corresponding base"
ucuuaucggccacugucaatt

SEQ ID NO: 229 - DNA, 21 bp, artificial sequence
  siRNA cross-reactive to human and rhesus monkey Eg5
  5'-terminal nucleic acid is a nucleoside, i.e. base + sugar but lacking 5'-phosphate
  modified_base 1, 4, 7, 10, 11, 14, 19: /mod_base = "2'-O-methyl corresponding base"
  modified_base 21: /mod_base = "5'-thio thymidine"
  modified_base 2, 3, 5, 6, 8, 9, 12, 13, 15, 16, 17, 18: /mod_base = "2'-hydroxy corresponding base"
ugacaguggccgauaagautt

SEQ ID NO: 230 - DNA, 21 bp, artificial sequence
  siRNA cross-reactive to human and rhesus monkey Eg5
  5'-terminal nucleic acid is a nucleoside, i.e. base + sugar but lacking 5'-phosphate
  modified_base 5, 12, 18: /mod_base = "2'-O-methyl corresponding base"
  modified_base 21: /mod_base = "5'-thio thymidine"
  modified_base 1, 2, 3, 4, 6, 7, 8, 9, 10, 11, 13, 14, 15, 16, 17, 19: /mod_base = "2'-hydroxy corresponding base"
aucuuaucggccacugucatt

SEQ ID NO: 231 - DNA, 21 bp, artificial sequence
  siRNA cross-reactive to human and rhesus monkey Eg5
  5'-terminal nucleic acid is a nucleoside, i.e. base + sugar but lacking 5'-phosphate
  modified_base 2, 5, 7, 13, 14, 15, 18, 19: /mod_base = "2'-O-methyl corresponding base"
  modified_base 21: /mod_base = "5'-thio thymidine"
  modified_base 1, 3, 4, 6, 8, 9, 10, 11, 12, 16, 17: /mod_base = "2'-hydroxy corresponding base"
gcaauguggaaaccuaacutt

SEQ ID NO: 232 - DNA, 21 bp, artificial sequence
  siRNA cross-reactive to human and rhesus monkey Eg5
  5'-terminal nucleic acid is a nucleoside, i.e. base + sugar but lacking 5'-phosphate
  modified_base 4, 12, 14: /mod_base = "2'-O-methyl corresponding base"
  modified_base 21: /mod_base = "5'-thio thymidine"
  modified_base 1, 2, 3, 5, 6, 7, 8, 9, 10, 11, 13, 15, 16, 17, 18, 19: /mod_base = "2'-hydroxy corresponding base"
aguuagguuuccacauugctt

SEQ ID NO: 233 - DNA, 21 bp, artificial sequence
  siRNA cross-reactive to human and rhesus monkey Eg5
  5'-terminal nucleic acid is a nucleoside, i.e. base + sugar but lacking 5'-phosphate
  modified_base 1, 2, 4, 5, 6, 9, 12, 14, 15, 16: /mod_base = "2'-O-methyl corresponding base"
  modified_base 21: /mod_base = "5'-thio thymidine"
  modified_base 3, 7, 8, 10, 11, 13, 17, 18, 19: /mod_base = "2'-hydroxy corresponding base"
ccacuuaguaguguccaggtt

SEQ ID NO: 234 - DNA, 21 bp, artificial sequence
  siRNA cross-reactive to human and rhesus monkey Eg5
  5'-terminal nucleic acid is a nucleoside, i.e. base + sugar but lacking 5'-phosphate
  modified_base 7, 10, 13: /mod_base = "2'-O-methyl corresponding base"
  modified_base 21: /mod_base = "5'-thio thymidine"
  modified_base 1, 2, 3, 4, 5, 6, 8, 9, 11, 12, 14, 15, 16, 17, 18, 19: /mod_base = "2'-hydroxy corresponding base"
ccuggacacuacuaaguggtt

SEQ ID NO: 235 - DNA, 21 bp, artificial sequence
  siRNA cross-reactive to human and rhesus monkey Eg5
  5'-terminal nucleic acid is a nucleoside, i.e. base + sugar but lacking 5'-phosphate
  modified_base 7, 9, 14, 15, 18, 19: /mod_base = "2'-O-methyl corresponding base"
  modified_base 21: /mod_base = "5'-thio thymidine"
  modified_base 1, 2, 3, 4, 5, 6, 8, 10, 11, 12, 13, 16, 17: /mod_base = "2'-hydroxy corresponding base"
agaagguacaaaauugguutt

SEQ ID NO: 236 - DNA, 21 bp, artificial sequence
  siRNA cross-reactive to human and rhesus monkey Eg5
  5'-terminal nucleic acid is a nucleoside, i.e. base + sugar but lacking 5'-phosphate
  modified_base 4, 12: /mod_base = "2'-O-methyl corresponding base"
  modified_base 21: /mod_base = "5'-thio thymidine"
  modified_base 1, 2, 3, 5, 6, 7, 8, 9, 10, 11, 13, 14, 15, 16, 17, 18, 19: /mod_base = "2'-hydroxy corresponding base"
aaccaauuuuguaccuucutt

SEQ ID NO: 237 - DNA, 21 bp, artificial sequence
  siRNA cross-reactive to human and rhesus monkey Eg5
  5'-terminal nucleic acid is a nucleoside, i.e. base + sugar but lacking 5'-phosphate
  modified_base 1, 4, 5, 6, 9, 10, 14, 15, 16, 19: /mod_base = "2'-O-methyl corresponding base"
  modified_base 21: /mod_base = "5'-thio thymidine"
  modified_base 2, 3, 7, 8, 11, 12, 13, 17, 18: /mod_base = "2'-hydroxy corresponding base"
ugguuugacuaagcuuaautt

SEQ ID NO: 238 - DNA, 21 bp, artificial sequence
  siRNA cross-reactive to human and rhesus monkey Eg5
  5'-terminal nucleic acid is a nucleoside, i.e. base + sugar but lacking 5'-phosphate
  modified_base 3, 9, 13, 18: /mod_base = "2'-O-methyl corresponding base"
  modified_base 21: /mod_base = "5'-thio thymidine"
  modified_base 1, 2, 4, 5, 6, 7, 8, 10, 11, 12, 14, 15, 16, 17, 19: /mod_base = "2'-hydroxy corresponding base"
auuaagcuuagucaaaccatt

SEQ ID NO: 239 - DNA, 21 bp, artificial sequence
  siRNA cross-reactive to human and rhesus monkey Eg5
  5'-terminal nucleic acid is a nucleoside, i.e. base + sugar but lacking 5'-phosphate
  modified_base 3, 4, 5, 8, 9, 13, 14, 15, 18, 19: /mod_base = "2'-O-methyl corresponding base"
  modified_base 21: /mod_base = "5'-thio thymidine"
  modified_base 1, 2, 6, 7, 10, 11, 12, 16, 17: /mod_base = "2'-hydroxy corresponding base"
gguuugacuaagcuuaauutt

SEQ ID NO: 240 - DNA, 21 bp, artificial sequence
  siRNA cross-reactive to human and rhesus monkey Eg5
  5'-terminal nucleic acid is a nucleoside, i.e. base + sugar but lacking 5'-phosphate
  modified_base 4, 10, 14: /mod_base = "2'-O-methyl corresponding base"
  modified_base 21: /mod_base = "5'-thio thymidine"
  modified_base 1, 2, 3, 5, 6, 7, 8, 9, 11, 12, 13, 15, 16, 17, 18, 19: /mod_base = "2'-hydroxy corresponding base"
aauuaagcuuagucaaacctt

SEQ ID NO: 241 - DNA, 21 bp, artificial sequence
  siRNA cross-reactive to human and rhesus monkey Eg5
  5'-terminal nucleic acid is a nucleoside, i.e. base + sugar but lacking 5'-phosphate
  modified_base 1, 2, 3, 7, 8, 14, 15, 17, 18, 19: /mod_base = "2'-O-methyl corresponding base"
  modified_base 21: /mod_base = "5'-thio thymidine"
  modified_base 4, 5, 6, 9, 10, 11, 12, 13, 16: /mod_base = "2'-hydroxy corresponding base"
ucuaagucaagagccaucutt

SEQ ID NO: 242 - DNA, 21 bp, artificial sequence
  siRNA cross-reactive to human and rhesus monkey Eg5
  5'-terminal nucleic acid is a nucleoside, i.e. base + sugar but lacking 5'-phosphate
  modified_base 16: /mod_base = "2'-O-methyl corresponding base"
  modified_base 21: /mod_base = "5'-thio thymidine"
  modified_base 1, 2, 3, 4, 5, 6, 7, 8, 9, 10, 11, 12, 13, 14, 15, 17, 18, 19: /mod_base = "2'-hydroxy corresponding base"
agauggcucuugacuuagatt

SEQ ID NO: 243 - DNA, 21 bp, artificial sequence
  siRNA cross-reactive to human and rhesus monkey Eg5
  5'-terminal nucleic acid is a nucleoside, i.e. base + sugar but lacking 5'-phosphate
  modified_base 1, 2, 4, 5, 6, 7, 8, 10, 13, 14, 15, 17, 18, 19: /mod_base = "2'-O-methyl corresponding base"
  modified_base 21: /mod_base = "5'-thio thymidine"
  modified_base 3, 9, 11, 12, 16: /mod_base = "2'-hydroxy corresponding base"
ucaucccuauaguucacuutt

SEQ ID NO: 244 - DNA, 21 bp, artificial sequence
  siRNA cross-reactive to human and rhesus monkey Eg5
  5'-terminal nucleic acid is a nucleoside, i.e. base + sugar but lacking 5'-phosphate
  modified_base 9, 11: /mod_base = "2'-O-methyl corresponding base"
  modified_base 21: /mod_base = "5'-thio thymidine"
  modified_base 1, 2, 3, 4, 5, 6, 7, 8, 10, 12, 13, 14, 15, 16, 17, 18, 19: /mod_base = "2'-hydroxy corresponding base"
aagugaacuauagggaugatt

SEQ ID NO: 245 - DNA, 21 bp, artificial sequence
  siRNA cross-reactive to human and rhesus monkey Eg5
  5'-terminal nucleic acid is a nucleoside, i.e. base + sugar but lacking 5'-phosphate
  modified_base 1, 3, 4, 5, 6, 7, 9, 12, 13, 14, 16, 17, 18, 19: /mod_base = "2'-O-methyl corresponding base"
  modified_base 21: /mod_base = "5'-thio thymidine"
  modified_base 2, 8, 10, 11, 15: /mod_base = "2'-hydroxy corresponding base"
caucccuauaguucacuuutt

SEQ ID NO: 246 - DNA, 21 bp, artificial sequence
  siRNA cross-reactive to human and rhesus monkey Eg5
  5'-terminal nucleic acid is a nucleoside, i.e. base + sugar but lacking 5'-phosphate
  modified_base 10, 12: /mod_base = "2'-O-methyl corresponding base"
  modified_base 21: /mod_base = "5'-thio thymidine"
  modified_base 1, 2, 3, 4, 5, 6, 7, 8, 9, 11, 13, 14, 15, 16, 17, 18, 19: /mod_base = "2'-hydroxy corresponding base"
aaagugaacuauagggaugtt

SEQ ID NO: 247 - DNA, 21 bp, artificial sequence
  siRNA cross-reactive to human and rhesus monkey Eg5
  5'-terminal nucleic acid is a nucleoside, i.e. base + sugar but lacking 5'-phosphate
  modified_base 1, 2, 3, 4, 8, 9, 10, 11, 12, 13, 14, 16, 17, 18, 19: /mod_base = "2'-O-methyl corresponding base"
  modified_base 21: /mod_base = "5'-thio thymidine"
  modified_base 5, 6, 7, 15: /mod_base = "2'-hydroxy corresponding base"
cccuagacuucccuauuuctt

SEQ ID NO: 248 - DNA, 21 bp, artificial sequence
  siRNA cross-reactive to human and rhesus monkey Eg5
  5'-terminal nucleic acid is a nucleoside, i.e. base + sugar but lacking 5'-phosphate
  modified_base 5, 15: /mod_base = "2'-O-methyl corresponding base"
  modified_base 21: /mod_base = "5'-thio thymidine"
  modified_base 1, 2, 3, 4, 6, 7, 8, 9, 10, 11, 12, 13, 14, 16, 17, 18, 19: /mod_base = "2'-hydroxy corresponding base"
gaaauagggaagucuagggtt

SEQ ID NO: 249 - DNA, 21 bp, artificial sequence
  siRNA cross-reactive to human and rhesus monkey Eg5
  5'-terminal nucleic acid is a nucleoside, i.e. base + sugar but lacking 5'-phosphate
  modified_base 4, 5, 6, 7, 8, 9, 10, 12, 13, 14, 15, 17, 18, 19: /mod_base = "2'-O-methyl corresponding base"
  modified_base 21: /mod_base = "5'-thio thymidine"
  modified_base 1, 2, 3, 11, 16: /mod_base = "2'-hydroxy corresponding base"
agacuucccuauuucgcuutt

SEQ ID NO: 250 - DNA, 21 bp, artificial sequence
  siRNA cross-reactive to human and rhesus monkey Eg5
  5'-terminal nucleic acid is a nucleoside, i.e. base + sugar but lacking 5'-phosphate
  modified_base 9: /mod_base = "2'-O-methyl corresponding base"
  modified_base 21: /mod_base = "5'-thio thymidine"
  modified_base 1, 2, 3, 4, 5, 6, 7, 8, 10, 11, 12, 13, 14, 15, 16, 17, 18, 19: /mod_base = "2'-hydroxy corresponding base"
aagcgaaauagggaagucutt

SEQ ID NO: 251 - DNA, 21 bp, artificial sequence
  siRNA cross-reactive to human and rhesus monkey Eg5
  5'-terminal nucleic acid is a nucleoside, i.e. base + sugar but lacking 5'-phosphate
  modified_base 1, 2, 4, 5, 9, 10, 12, 13, 14, 16: /mod_base = "2'-O-methyl corresponding base"
  modified_base 21: /mod_base = "5'-thio thymidine"
  modified_base 3, 6, 7, 8, 11, 15, 17, 18, 19: /mod_base = "2'-hydroxy corresponding base"
ucaccaaaccauuuguagatt

SEQ ID NO: 252 - DNA, 21 bp, artificial sequence
  siRNA cross-reactive to human and rhesus monkey Eg5
  5'-terminal nucleic acid is a nucleoside, i.e. base + sugar but lacking 5'-phosphate
  modified_base 3, 5: /mod_base = "2'-O-methyl corresponding base"
  modified_base 21: /mod_base = "5'-thio thymidine"
  modified_base 1, 2, 4, 6, 7, 8, 9, 10, 11, 12, 13, 14, 15, 16, 17, 18, 19: /mod_base = "2'-hydroxy corresponding base"
ucuacaaaugguuuggugatt

SEQ ID NO: 253 - DNA, 21 bp, artificial sequence
  siRNA cross-reactive to human and rhesus monkey Eg5
  5'-terminal nucleic acid is a nucleoside, i.e. base + sugar but lacking 5'-phosphate
  modified_base 1, 2, 3, 4, 5, 6, 13, 14, 15, 18, 19: /mod_base = "2'-O-methyl corresponding base"
  modified_base 21: /mod_base = "5'-thio thymidine"
  modified_base 7, 8, 9, 10, 11, 12, 16, 17: /mod_base = "2'-hydroxy corresponding base"
uccuuuaagaggccuaacutt

SEQ ID NO: 254 - DNA, 21 bp, artificial sequence
  siRNA cross-reactive to human and rhesus monkey Eg5
  5'-terminal nucleic acid is a nucleoside, i.e. base + sugar but lacking 5'-phosphate
  modified_base 4, 13: /mod_base = "2'-O-methyl corresponding base"
  modified_base 21: /mod_base = "5'-thio thymidine"
  modified_base 1, 2, 3, 5, 6, 7, 8, 9, 10, 11, 12, 14, 15, 16, 17, 18, 19: /mod_base = "2'-hydroxy corresponding base"
aguuaggccucuuaaaggatt

SEQ ID NO: 255 - DNA, 21 bp, artificial sequence
  siRNA cross-reactive to human and rhesus monkey Eg5
  5'-terminal nucleic acid is a nucleoside, i.e. base + sugar but lacking 5'-phosphate
  modified_base 1, 2, 3, 10, 11, 12, 15, 16, 17, 19: /mod_base = "2'-O-methyl corresponding base"
  modified_base 21: /mod_base = "5'-thio thymidine"
  modified_base 4, 5, 6, 7, 8, 9, 13, 14, 18: /mod_base = "2'-hydroxy corresponding base"
uuuaagaggccuaacucautt

SEQ ID NO: 256 - DNA, 21 bp, artificial sequence
  siRNA cross-reactive to human and rhesus monkey Eg5
  5'-terminal nucleic acid is a nucleoside, i.e. base + sugar but lacking 5'-phosphate
  modified_base 7, 16: /mod_base = "2'-O-methyl corresponding base"
  modified_base 21: /mod_base = "5'-thio thymidine"
  modified_base 1, 2, 3, 4, 5, 6, 8, 9, 10, 11, 12, 13, 14, 15, 17, 18, 19: /mod_base = "2'-hydroxy corresponding base"
augaguuaggccucuuaaatt

SEQ ID NO: 257 - DNA, 21 bp, artificial sequence
  siRNA cross-reactive to human and rhesus monkey Eg5
  5'-terminal nucleic acid is a nucleoside, i.e. base + sugar but lacking 5'-phosphate
  modified_base 1, 2, 9, 10, 11, 14, 15, 16, 18, 19: /mod_base = "2'-O-methyl corresponding base"
  modified_base 21: /mod_base = "5'-thio thymidine"
  modified_base 3, 4, 5, 6, 7, 8, 12, 13, 17: /mod_base = "2'-hydroxy corresponding base"
uuaagaggccuaacucauutt

SEQ ID NO: 258 - DNA, 21 bp, artificial sequence
  siRNA cross-reactive to human and rhesus monkey Eg5
  5'-terminal nucleic acid is a nucleoside, i.e. base + sugar but lacking 5'-phosphate
  modified_base 8, 17: /mod_base = "2'-O-methyl corresponding base"
  modified_base 21: /mod_base = "5'-thio thymidine"
  modified_base 1, 2, 3, 4, 5, 6, 7, 9, 10, 11, 12, 13, 14, 15, 16, 18, 19: /mod_base = "2'-hydroxy corresponding base"
aaugaguuaggccucuuaatt

SEQ ID NO: 259 - DNA, 21 bp, artificial sequence
  siRNA cross-reactive to human and rhesus monkey Eg5
  5'-terminal nucleic acid is a nucleoside, i.e. base + sugar but lacking 5'-phosphate
  modified_base 3, 4, 5, 8, 9, 10, 12, 13, 14, 16, 17, 18, 19: /mod_base = "2'-O-methyl corresponding base"
  modified_base 21: /mod_base = "5'-thio thymidine"
  modified_base 1, 2, 6, 7, 11, 15: /mod_base = "2'-hydroxy corresponding base"
ggccuaacucauucacccutt

SEQ ID NO: 260 - DNA, 21 bp, artificial sequence
  siRNA cross-reactive to human and rhesus monkey Eg5
  5'-terminal nucleic acid is a nucleoside, i.e. base + sugar but lacking 5'-phosphate
  modified_base 14: /mod_base = "2'-O-methyl corresponding base"
  modified_base 21: /mod_base = "5'-thio thymidine"
  modified_base 1, 2, 3, 4, 5, 6, 7, 8, 9, 10, 11, 12, 13, 15, 16, 17, 18, 19: /mod_base = "2'-hydroxy corresponding base"
agggugaaugaguuaggcctt

SEQ ID NO: 261 - DNA, 21 bp, artificial sequence
  siRNA cross-reactive to human and rhesus monkey Eg5
  5'-terminal nucleic acid is a nucleoside, i.e. base + sugar but lacking 5'-phosphate
  modified_base 1, 4, 6, 7, 8, 9, 10, 13, 14, 15, 18: /mod_base = "2'-O-methyl corresponding base"
  modified_base 21: /mod_base = "5'-thio thymidine"
  modified_base 2, 3, 5, 11, 12, 16, 17, 19: /mod_base = "2'-hydroxy corresponding base"
ugguauuuuugaucuggcatt

SEQ ID NO: 262 - DNA, 21 bp, artificial sequence
  siRNA cross-reactive to human and rhesus monkey Eg5
  5'-terminal nucleic acid is a nucleoside, i.e. base + sugar but lacking 5'-phosphate
  modified_base 4, 9, 15, 18: /mod_base = "2'-O-methyl corresponding base"
  modified_base 21: /mod_base = "5'-thio thymidine"
  modified_base 1, 2, 3, 5, 6, 7, 8, 10, 11, 12, 13, 14, 16, 17, 19: /mod_base = "2'-hydroxy corresponding base"
ugccagaucaaaaauaccatt

SEQ ID NO: 263 - DNA, 21 bp, artificial sequence
  siRNA cross-reactive to human and rhesus monkey Eg5
  5'-terminal nucleic acid is a nucleoside, i.e. base + sugar but lacking 5'-phosphate
  modified_base 3, 4, 5, 8, 10, 12, 17, 18, 19: /mod_base = "2'-O-methyl corresponding base"
  modified_base 21: /mod_base = "5'-thio thymidine"
  modified_base 1, 2, 6, 7, 9, 11, 13, 14, 15, 16: /mod_base = "2'-hydroxy corresponding base"
aguuuaguguguaaaguuutt

SEQ ID NO: 264 - DNA, 21 bp, artificial sequence
  siRNA cross-reactive to human and rhesus monkey Eg5
  5'-terminal nucleic acid is a nucleoside, i.e. base + sugar but lacking 5'-phosphate
  modified_base 7, 9, 11, 14: /mod_base = "2'-O-methyl corresponding base"
  modified_base 21: /mod_base = "5'-thio thymidine"
  modified_base 1, 2, 3, 4, 5, 6, 8, 10, 12, 13, 15, 16, 17, 18, 19: /mod_base = "2'-hydroxy corresponding base"
aaacuuuacacacuaaacutt

SEQ ID NO: 265 - DNA, 21 bp, artificial sequence
  siRNA cross-reactive to human and rhesus monkey Eg5
  5'-terminal nucleic acid is a nucleoside, i.e. base + sugar but lacking 5'-phosphate
  modified_base 2, 3, 7, 8, 9, 11, 12, 13, 15: /mod_base = "2'-O-methyl corresponding base"
  modified_base 21: /mod_base = "5'-thio thymidine"
  modified_base 1, 4, 5, 6, 10, 14, 16, 17, 18, 19: /mod_base = "2'-hydroxy corresponding base"
gccaaauucgucugcgaagtt

SEQ ID NO: 266 - DNA, 21 bp, artificial sequence
  siRNA cross-reactive to human and rhesus monkey Eg5
  5'-terminal nucleic acid is a nucleoside, i.e. base + sugar but lacking 5'-phosphate
  modified_base 6: /mod_base = "2'-O-methyl corresponding base"
  modified_base 21: /mod_base = "5'-thio thymidine"
  modified_base 1, 2, 3, 4, 5, 7, 8, 9, 10, 11, 12, 13, 14, 15, 16, 17, 18, 19: /mod_base = "2'-hydroxy corresponding base"
cuucgcagacgaauuuggctt

SEQ ID NO: 267 - DNA, 21 bp, artificial sequence
  siRNA cross-reactive to human and rhesus monkey Eg5
  5'-terminal nucleic acid is a nucleoside, i.e. base + sugar but lacking 5'-phosphate
  modified_base 3, 4, 5, 7, 8, 9, 11: /mod_base = "2'-O-methyl corresponding base"
  modified_base 21: /mod_base = "5'-thio thymidine"
  modified_base 1, 2, 6, 10, 12, 13, 14, 15, 16, 17, 18, 19: /mod_base = "2'-hydroxy corresponding base"
aauucgucugcgaagaagatt

SEQ ID NO: 268 - DNA, 21 bp, artificial sequence
  siRNA cross-reactive to human and rhesus monkey Eg5
  5'-terminal nucleic acid is a nucleoside, i.e. base + sugar but lacking 5'-phosphate
  modified_base 10: /mod_base = "2'-O-methyl corresponding base"
  modified_base 21: /mod_base = "5'-thio thymidine"
  modified_base 1, 2, 3, 4, 5, 6, 7, 8, 9, 11, 12, 13, 14, 15, 16, 17, 18, 19: /mod_base = "2'-hydroxy corresponding base"
ucuucuucgcagacgaauutt

SEQ ID NO: 269 - DNA, 21 bp, artificial sequence
  siRNA cross-reactive to human and rhesus monkey Eg5
  5'-terminal nucleic acid is a nucleoside, i.e. base + sugar but lacking 5'-phosphate
  modified_base 1, 8, 9, 11, 12, 13, 16: /mod_base = "2'-O-methyl corresponding base"
  modified_base 21: /mod_base = "5'-thio thymidine"
  modified_base 2, 3, 4, 5, 6, 7, 10, 14, 15, 17, 18, 19: /mod_base = "2'-hydroxy corresponding base"
ugaaaggucaccuaaugaatt

SEQ ID NO: 270 - DNA, 21 bp, artificial sequence
  siRNA cross-reactive to human and rhesus monkey Eg5
  5'-terminal nucleic acid is a nucleoside, i.e. base + sugar but lacking 5'-phosphate
  modified_base 3, 6, 18: /mod_base = "2'-O-methyl corresponding base"
  modified_base 21: /mod_base = "5'-thio thymidine"
  modified_base 1, 2, 4, 5, 7, 8, 9, 10, 11, 12, 13, 14, 15, 16, 17, 19: /mod_base = "2'-hydroxy corresponding base"
uucauuaggugaccuuucatt

SEQ ID NO: 271 - DNA, 21 bp, artificial sequence
  siRNA cross-reactive to human and rhesus monkey Eg5
  5'-terminal nucleic acid is a nucleoside, i.e. base + sugar but lacking 5'-phosphate
  modified_base 1, 5, 6, 8, 9, 10, 13, 14, 15, 18: /mod_base = "2'-O-methyl corresponding base"
  modified_base 21: /mod_base = "5'-thio thymidine"
  modified_base 2, 3, 4, 7, 11, 12, 16, 17, 19: /mod_base = "2'-hydroxy corresponding base"
cagaccauuuaauuuggcatt

SEQ ID NO: 272 - DNA, 21 bp, artificial sequence
  siRNA cross-reactive to human and rhesus monkey Eg5
  5'-terminal nucleic acid is a nucleoside, i.e. base + sugar but lacking 5'-phosphate
  modified_base 4, 9: /mod_base = "2'-O-methyl corresponding base"
  modified_base 21: /mod_base = "5'-thio thymidine"
  modified_base 1, 2, 3, 5, 6, 7, 8, 10, 11, 12, 13, 14, 15, 16, 17, 18, 19: /mod_base = "2'-hydroxy corresponding base"
ugccaaauuaaauggucugtt

SEQ ID NO: 273 - DNA, 21 bp, artificial sequence
  siRNA cross-reactive to human and rhesus monkey Eg5
  5'-terminal nucleic acid is a nucleoside, i.e. base + sugar but lacking 5'-phosphate
  modified_base 4, 5, 7, 8, 9, 12, 13, 14, 17: /mod_base = "2'-O-methyl corresponding base"
  modified_base 21: /mod_base = "5'-thio thymidine"
  modified_base 1, 2, 3, 6, 10, 11, 15, 16, 18, 19: /mod_base = "2'-hydroxy corresponding base"
agaccauuuaauuuggcagtt

SEQ ID NO: 274 - DNA, 21 bp, artificial sequence
  siRNA cross-reactive to human and rhesus monkey Eg5
  5'-terminal nucleic acid is a nucleoside, i.e. base + sugar but lacking 5'-phosphate
  modified_base 5, 10: /mod_base = "2'-O-methyl corresponding base"
  modified_base 21: /mod_base = "5'-thio thymidine"
  modified_base 1, 2, 3, 4, 6, 7, 8, 9, 11, 12, 13, 14, 15, 16, 17, 18, 19: /mod_base = "2'-hydroxy corresponding base"
cugccaaauuaaauggucutt

SEQ ID NO: 275 - DNA, 21 bp, artificial sequence
  siRNA cross-reactive to human and rhesus monkey Eg5
  5'-terminal nucleic acid is a nucleoside, i.e. base + sugar but lacking 5'-phosphate
  modified_base 3, 4, 6, 7, 9, 13, 14, 16, 19: /mod_base = "2'-O-methyl corresponding base"
  modified_base 21: /mod_base = "5'-thio thymidine"
  modified_base 1, 2, 5, 8, 10, 11, 12, 15, 17, 18: /mod_base = "2'-hydroxy corresponding base"
aguuauuaugggcuauaautt

SEQ ID NO: 276 - DNA, 21 bp, artificial sequence
  siRNA cross-reactive to human and rhesus monkey Eg5
  5'-terminal nucleic acid is a nucleoside, i.e. base + sugar but lacking 5'-phosphate
  modified_base 3, 5, 10, 12, 15: /mod_base = "2'-O-methyl corresponding base"
  modified_base 21: /mod_base = "5'-thio thymidine"
  modified_base 1, 2, 4, 6, 7, 8, 9, 11, 13, 14, 16, 17, 18, 19: /mod_base = "2'-hydroxy corresponding base"
auuauagcccauaauaacutt

SEQ ID NO: 277 - DNA, 21 bp, artificial sequence
  siRNA cross-reactive to human and rhesus monkey Eg5
  5'-terminal nucleic acid is a nucleoside, i.e. base + sugar but lacking 5'-phosphate
  modified_base 2, 3, 6, 8, 11, 12, 13, 14, 16, 18: /mod_base = "2'-O-methyl corresponding base"
  modified_base 21: /mod_base = "5'-thio thymidine"
  modified_base 1, 4, 5, 7, 9, 10, 15, 17, 19: /mod_base = "2'-hydroxy corresponding base"
gcugguauaauuccacguatt

SEQ ID NO: 278 - DNA, 21 bp, artificial sequence
  siRNA cross-reactive to human and rhesus monkey Eg5
  5'-terminal nucleic acid is a nucleoside, i.e. base + sugar but lacking 5'-phosphate
  modified_base 1, 11, 13, 16: /mod_base = "2'-O-methyl corresponding base"
  modified_base 21: /mod_base = "5'-thio thymidine"
  modified_base 2, 3, 4, 5, 6, 7, 8, 9, 10, 12, 14, 15, 17, 18, 19: /mod_base = "2'-hydroxy corresponding base"
uacguggaauuauaccagctt

SEQ ID NO: 279 - DNA, 21 bp, artificial sequence
  siRNA cross-reactive to human and rhesus monkey Eg5
  5'-terminal nucleic acid is a nucleoside, i.e. base + sugar but lacking 5'-phosphate
  modified_base 2, 3, 4, 7, 8, 9, 12, 17: /mod_base = "2'-O-methyl corresponding base"
  modified_base 21: /mod_base = "5'-thio thymidine"
  modified_base 1, 5, 6, 10, 11, 13, 14, 15, 16, 18, 19: /mod_base = "2'-hydroxy corresponding base"
auuuaauuuggcagagcggtt

SEQ ID NO: 280 - DNA, 21 bp, artificial sequence
  siRNA cross-reactive to human and rhesus monkey Eg5
  5'-terminal nucleic acid is a nucleoside, i.e. base + sugar but lacking 5'-phosphate
  modified_base 10, 15: /mod_base = "2'-O-methyl corresponding base"
  modified_base 21: /mod_base = "5'-thio thymidine"
  modified_base 1, 2, 3, 4, 5, 6, 7, 8, 9, 11, 12, 13, 14, 16, 17, 18, 19: /mod_base = "2'-hydroxy corresponding base"
ccgcucugccaaauuaaautt

SEQ ID NO: 281 - DNA, 21 bp, artificial sequence
  siRNA cross-reactive to human and rhesus monkey Eg5
  5'-terminal nucleic acid is a nucleoside, i.e. base + sugar but lacking 5'-phosphate
  modified_base 1, 2, 3, 6, 7, 8, 11, 16: /mod_base = "2'-O-methyl corresponding base"
  modified_base 21: /mod_base = "5'-thio thymidine"
  modified_base 4, 5, 9, 10, 12, 13, 14, 15, 17, 18, 19: /mod_base = "2'-hydroxy corresponding base"
uuuaauuuggcagagcggatt

SEQ ID NO: 282 - DNA, 21 bp, artificial sequence
  siRNA cross-reactive to human and rhesus monkey Eg5
  5'-terminal nucleic acid is a nucleoside, i.e. base + sugar but lacking 5'-phosphate
  modified_base 11, 16: /mod_base = "2'-O-methyl corresponding base"
  modified_base 21: /mod_base = "5'-thio thymidine"
  modified_base 1, 2, 3, 4, 5, 6, 7, 8, 9, 10, 12, 13, 14, 15, 17, 18, 19: /mod_base = "2'-hydroxy corresponding base"
uccgcucugccaaauuaaatt

SEQ ID NO: 283 - DNA, 21 bp, artificial sequence
  siRNA cross-reactive to human and rhesus monkey Eg5
  5'-terminal nucleic acid is a nucleoside, i.e. base + sugar but lacking 5'-phosphate
  modified_base 1, 2, 3, 6, 11, 18, 19: /mod_base = "2'-O-methyl corresponding base"
  modified_base 21: /mod_base = "5'-thio thymidine"
  modified_base 4, 5, 7, 8, 9, 10, 12, 13, 14, 15, 16, 17: /mod_base = "2'-hydroxy corresponding base"
uuuggcagagcggaaagcutt

SEQ ID NO: 284 - DNA, 21 bp, artificial sequence
  siRNA cross-reactive to human and rhesus monkey Eg5
  5'-terminal nucleic acid is a nucleoside, i.e. base + sugar but lacking 5'-phosphate
  modified_base 16: /mod_base = "2'-O-methyl corresponding base"
  modified_base 21: /mod_base = "5'-thio thymidine"
  modified_base 1, 2, 3, 4, 5, 6, 7, 8, 9, 10, 11, 12, 13, 14, 15, 17, 18, 19: /mod_base = "2'-hydroxy corresponding base"
agcuuuccgcucugccaaatt

SEQ ID NO: 285 - DNA, 21 bp, artificial sequence
  siRNA cross-reactive to human and rhesus monkey Eg5
  5'-terminal nucleic acid is a nucleoside, i.e. base + sugar but lacking 5'-phosphate
  modified_base 1, 2, 3, 4, 6, 9, 16: /mod_base = "2'-O-methyl corresponding base"
  modified_base 21: /mod_base = "5'-thio thymidine"
  modified_base 5, 7, 8, 10, 11, 12, 13, 14, 15, 17, 18, 19: /mod_base = "2'-hydroxy corresponding base"
uuuuacaauggaaggugaatt

SEQ ID NO: 286 - DNA, 21 bp, artificial sequence
  siRNA cross-reactive to human and rhesus monkey Eg5
  5'-terminal nucleic acid is a nucleoside, i.e. base + sugar but lacking 5'-phosphate
  modified_base 3, 10, 15: /mod_base = "2'-O-methyl corresponding base"
  modified_base 21: /mod_base = "5'-thio thymidine"
  modified_base 1, 2, 4, 5, 6, 7, 8, 9, 11, 12, 13, 14, 16, 17, 18, 19: /mod_base = "2'-hydroxy corresponding base"
uucaccuuccauuguaaaatt

SEQ ID NO: 287 - DNA, 21 bp, artificial sequence
  siRNA cross-reactive to human and rhesus monkey Eg5
  5'-terminal nucleic acid is a nucleoside, i.e. base + sugar but lacking 5'-phosphate
  modified_base 3, 10, 17, 18: /mod_base = "2'-O-methyl corresponding base"
  modified_base 21: /mod_base = "5'-thio thymidine"
  modified_base 1, 2, 4, 5, 6, 7, 8, 9, 11, 12, 13, 14, 15, 16, 19: /mod_base = "2'-hydroxy corresponding base"
aauggaaggugaaaggucatt

SEQ ID NO: 288 - DNA, 21 bp, artificial sequence
  siRNA cross-reactive to human and rhesus monkey Eg5
  5'-terminal nucleic acid is a nucleoside, i.e. base + sugar but lacking 5'-phosphate
  modified_base 9, 16: /mod_base = "2'-O-methyl corresponding base"
  modified_base 21: /mod_base = "5'-thio thymidine"
  modified_base 1, 2, 3, 4, 5, 6, 7, 8, 10, 11, 12, 13, 14, 15, 17, 18, 19: /mod_base = "2'-hydroxy corresponding base"
ugaccuuucaccuuccauutt

SEQ ID NO: 289 - DNA, 21 bp, artificial sequence
  siRNA cross-reactive to human and rhesus monkey Eg5
  5'-terminal nucleic acid is a nucleoside, i.e. base + sugar but lacking 5'-phosphate
  modified_base 1, 6, 8, 12, 13, 15, 16, 17: /mod_base = "2'-O-methyl corresponding base"
  modified_base 21: /mod_base = "5'-thio thymidine"
  modified_base 2, 3, 4, 5, 7, 9, 10, 11, 14, 18, 19: /mod_base = "2'-hydroxy corresponding base"
ugagaugcagaccauuuaatt

SEQ ID NO: 290 - DNA, 21 bp, artificial sequence
  siRNA cross-reactive to human and rhesus monkey Eg5
  5'-terminal nucleic acid is a nucleoside, i.e. base + sugar but lacking 5'-phosphate
  modified_base 2, 13, 18: /mod_base = "2'-O-methyl corresponding base"
  modified_base 21: /mod_base = "5'-thio thymidine"
  modified_base 1, 3, 4, 5, 6, 7, 8, 9, 10, 11, 12, 14, 15, 16, 17, 19: /mod_base = "2'-hydroxy corresponding base"
uuaaauggucugcaucucatt

SEQ ID NO: 291 - DNA, 21 bp, artificial sequence
  siRNA cross-reactive to human and rhesus monkey Eg5
  5'-terminal nucleic acid is a nucleoside, i.e. base + sugar but lacking 5'-phosphate
  modified_base 1, 2, 4, 7, 8, 12, 13, 14, 16, 17, 18: /mod_base = "2'-O-methyl corresponding base"
  modified_base 21: /mod_base = "5'-thio thymidine"
  modified_base 3, 5, 6, 9, 10, 11, 15, 19: /mod_base = "2'-hydroxy corresponding base"
ucgcagccaaauucgucugtt

SEQ ID NO: 292 - DNA, 21 bp, artificial sequence
  siRNA cross-reactive to human and rhesus monkey Eg5
  5'-terminal nucleic acid is a nucleoside, i.e. base + sugar but lacking 5'-phosphate
  modified_base 1: /mod_base = "2'-O-methyl corresponding base"
  modified_base 21: /mod_base = "5'-thio thymidine"
  modified_base 2..19: /mod_base = "2'-hydroxy corresponding base"
cagacgaauuuggcugcgatt

SEQ ID NO: 293 - DNA, 21 bp, artificial sequence
  siRNA cross-reactive to human and rhesus monkey Eg5
  5'-terminal nucleic acid is a nucleoside, i.e. base + sugar but lacking 5'-phosphate
  modified_base 3, 4, 6, 9, 10, 12, 14, 15, 17, 18, 19: /mod_base = "2'-O-methyl corresponding base"
  modified_base 21: /mod_base = "5'-thio thymidine"
  modified_base 1, 2, 5, 7, 8, 11, 13, 16: /mod_base = "2'-hydroxy corresponding base"
ggcuauaauugcacuaucutt

SEQ ID NO: 294 - DNA, 21 bp, artificial sequence
  siRNA cross-reactive to human and rhesus monkey Eg5
  5'-terminal nucleic acid is a nucleoside, i.e. base + sugar but lacking 5'-phosphate
  modified_base 4, 9, 13, 15: /mod_base = "2'-O-methyl corresponding base"
  modified_base 21: /mod_base = "5'-thio thymidine"
  modified_base 1, 2, 3, 5, 6, 7, 8, 10, 11, 12, 14, 16, 17, 18, 19: /mod_base = "2'-hydroxy corresponding base"
agauagugcaauuauagcctt

SEQ ID NO: 295 - DNA, 21 bp, artificial sequence
  siRNA cross-reactive to human and rhesus monkey Eg5
  5'-terminal nucleic acid is a nucleoside, i.e. base + sugar but lacking 5'-phosphate
  modified_base 2, 3, 6, 9, 12, 13, 16: /mod_base = "2'-O-methyl corresponding base"
  modified_base 21: /mod_base = "5'-thio thymidine"
  modified_base 1, 4, 5, 7, 8, 10, 11, 14, 15, 17, 18, 19: /mod_base = "2'-hydroxy corresponding base"
auugacaguggccgauaagtt

SEQ ID NO: 296 - DNA, 21 bp, artificial sequence
  siRNA cross-reactive to human and rhesus monkey Eg5
  5'-terminal nucleic acid is a nucleoside, i.e. base + sugar but lacking 5'-phosphate
  modified_base 3, 10, 16: /mod_base = "2'-O-methyl corresponding base"
  modified_base 21: /mod_base = "5'-thio thymidine"
  modified_base 1, 2, 4, 5, 6, 7, 8, 9, 11, 12, 13, 14, 15, 17, 18, 19: /mod_base = "2'-hydroxy corresponding base"
cuuaucggccacugucaautt

SEQ ID NO: 297 - DNA, 21 bp, artificial sequence
  siRNA cross-reactive to human and rhesus monkey Eg5
  5'-terminal nucleic acid is a nucleoside, i.e. base + sugar but lacking 5'-phosphate
  modified_base 1, 2, 6, 7, 8, 9, 10, 11, 12, 14, 15, 16, 17, 19: /mod_base = "2'-O-methyl corresponding base"
  modified_base 21: /mod_base = "5'-thio thymidine"
  modified_base 3, 4, 5, 13, 18: /mod_base = "2'-hydroxy corresponding base"
cuagacuucccuauuucgctt

SEQ ID NO: 298 - DNA, 21 bp, artificial sequence
  siRNA cross-reactive to human and rhesus monkey Eg5
  5'-terminal nucleic acid is a nucleoside, i.e. base + sugar but lacking 5'-phosphate
  modified_base 7, 17: /mod_base = "2'-O-methyl corresponding base"
  modified_base 21: /mod_base = "5'-thio thymidine"
  modified_base 1, 2, 3, 4, 5, 6, 8, 9, 10, 11, 12, 13, 14, 15, 16, 18, 19: /mod_base = "2'-hydroxy corresponding base"
gcgaaauagggaagucuagtt

SEQ ID NO: 299 - DNA, 21 bp, artificial sequence
  siRNA cross-reactive to human and rhesus monkey Eg5
  5'-terminal nucleic acid is a nucleoside, i.e. base + sugar but lacking 5'-phosphate
  modified_base 2, 3, 5, 6, 7, 8, 9, 11, 13, 15, 18, 19: /mod_base = "2'-O-methyl corresponding base"
  modified_base 21: /mod_base = "5'-thio thymidine"
  modified_base 1, 4, 10, 12, 14, 16, 17: /mod_base = "2'-hydroxy corresponding base"
acuaucuuugcguauggcctt

SEQ ID NO: 300 - DNA, 21 bp, artificial sequence
  siRNA cross-reactive to human and rhesus monkey Eg5
  5'-terminal nucleic acid is a nucleoside, i.e. base + sugar but lacking 5'-phosphate
  modified_base 4, 6, 10, 16: /mod_base = "2'-O-methyl corresponding base"
  modified_base 21: /mod_base = "5'-thio thymidine"
  modified_base 1, 2, 3, 5, 7, 8, 9, 11, 12, 13, 14, 15, 17, 18, 19: /mod_base = "2'-hydroxy corresponding base"
ggccauacgcaaagauagutt

SEQ ID NO: 301 - DNA, 21 bp, artificial sequence
  siRNA cross-reactive to human and rhesus monkey Eg5
  5'-terminal nucleic acid is a nucleoside, i.e. base + sugar but lacking 5'-phosphate
  modified_base 2, 4, 5, 6, 7, 10, 11, 13, 14, 15, 16, 17, 19: /mod_base = "2'-O-methyl corresponding base"
  modified_base 21: /mod_base = "5'-thio thymidine"
  modified_base 1, 3, 8, 9, 12, 18: /mod_base = "2'-hydroxy corresponding base"
auacucuagucguucccactt

SEQ ID NO: 302 - DNA, 21 bp, artificial sequence
  siRNA cross-reactive to human and rhesus monkey Eg5
  5'-terminal nucleic acid is a nucleoside, i.e. base + sugar but lacking 5'-phosphate
  modified_base 12, 17: /mod_base = "2'-O-methyl corresponding base"
  modified_base 21: /mod_base = "5'-thio thymidine"
  modified_base 1, 2, 3, 4, 5, 6, 7, 8, 9, 10, 11, 13, 14, 15, 16, 18, 19: /mod_base = "2'-hydroxy corresponding base"
gugggaacgacuagaguautt

SEQ ID NO: 303 - DNA, 21 bp, artificial sequence
  siRNA cross-reactive to human and rhesus monkey Eg5
  5'-terminal nucleic acid is a nucleoside, i.e. base + sugar but lacking 5'-phosphate
  modified_base 8, 9, 11, 14, 15, 18: /mod_base = "2'-O-methyl corresponding base"
  modified_base 21: /mod_base = "5'-thio thymidine"
  modified_base 1, 2, 3, 4, 5, 6, 7, 10, 12, 13, 16, 17, 19: /mod_base = "2'-hydroxy corresponding base"
aaagaaacuacgauugaugtt

SEQ ID NO: 304 - DNA, 21 bp, artificial sequence
  siRNA cross-reactive to human and rhesus monkey Eg5
  5'-terminal nucleic acid is a nucleoside, i.e. base + sugar but lacking 5'-phosphate
  modified_base 1, 4, 10: /mod_base = "2'-O-methyl corresponding base"
  modified_base 21: /mod_base = "5'-thio thymidine"
  modified_base 2, 3, 5, 6, 7, 8, 9, 11, 12, 13, 14, 15, 16, 17, 18, 19: /mod_base = "2'-hydroxy corresponding base"
caucaaucguaguuucuuutt

SEQ ID NO: 305 - DNA, 21 bp, artificial sequence
  siRNA cross-reactive to human and rhesus monkey Eg5
  5'-terminal nucleic acid is a nucleoside, i.e. base + sugar but lacking 5'-phosphate
  modified_base 2, 3, 4, 5, 8, 9, 10, 11, 12, 13, 16: /mod_base = "2'-O-methyl corresponding base"
  modified_base 21: /mod_base = "5'-thio thymidine"
  modified_base 1, 6, 7, 14, 15, 17, 18, 19: /mod_base = "2'-hydroxy corresponding base"
gccuugauuuuuuggcgggtt

SEQ ID NO: 306 - DNA, 21 bp, artificial sequence
  siRNA cross-reactive to human and rhesus monkey Eg5
  5'-terminal nucleic acid is a nucleoside, i.e. base + sugar but lacking 5'-phosphate
  modified_base 6, 14: /mod_base = "2'-O-methyl corresponding base"
  modified_base 21: /mod_base = "5'-thio thymidine"
  modified_base 1, 2, 3, 4, 5, 7, 8, 9, 10, 11, 12, 13, 15, 16, 17, 18, 19: /mod_base = "2'-hydroxy corresponding base"
cccgccaaaaaaucaaggctt

SEQ ID NO: 307 - DNA, 21 bp, artificial sequence
  siRNA cross-reactive to human and rhesus monkey Eg5
  5'-terminal nucleic acid is a nucleoside, i.e. base + sugar but lacking 5'-phosphate
  modified_base 1, 3, 4, 5, 7, 8, 9, 12, 15: /mod_base = "2'-O-methyl corresponding base"
  modified_base 21: /mod_base = "5'-thio thymidine"
  modified_base 2, 6, 10, 11, 13, 14, 16, 17, 18, 19: /mod_base = "2'-hydroxy corresponding base"
cgcccauucaauaguagaatt

SEQ ID NO: 308 - DNA, 21 bp, artificial sequence
  siRNA cross-reactive to human and rhesus monkey Eg5
  5'-terminal nucleic acid is a nucleoside, i.e. base + sugar but lacking 5'-phosphate
  modified_base 4, 7: /mod_base = "2'-O-methyl corresponding base"
  modified_base 21: /mod_base = "5'-thio thymidine"
  modified_base 1, 2, 3, 5, 6, 8, 9, 10, 11, 12, 13, 14, 15, 16, 17, 18, 19: /mod_base = "2'-hydroxy corresponding base"
uucuacuauugaaugggcgtt

SEQ ID NO: 309 - DNA, 21 bp, artificial sequence
  siRNA cross-reactive to human and rhesus monkey Eg5
  5'-terminal nucleic acid is a nucleoside, i.e. base + sugar but lacking 5'-phosphate
  modified_base 1, 2, 3, 4, 6, 7, 8, 11, 14, 15, 16, 18, 19: /mod_base = "2'-O-methyl corresponding base"
  modified_base 21: /mod_base = "5'-thio thymidine"
  modified_base 5, 9, 10, 12, 13, 17: /mod_base = "2'-hydroxy corresponding base"
ccuuauuugguaaucugcutt

SEQ ID NO: 310 - DNA, 21 bp, artificial sequence
  siRNA cross-reactive to human and rhesus monkey Eg5
  5'-terminal nucleic acid is a nucleoside, i.e. base + sugar but lacking 5'-phosphate
  modified_base 3, 8, 11, 15: /mod_base = "2'-O-methyl corresponding base"
  modified_base 21: /mod_base = "5'-thio thymidine"
  modified_base 1, 2, 4, 5, 6, 7, 9, 10, 12, 13, 14, 16, 17, 18, 19: /mod_base = "2'-hydroxy corresponding base"
agcagauuaccaaauaaggtt

SEQ ID NO: 311 - DNA, 21 bp, artificial sequence
  siRNA cross-reactive to human and rhesus monkey Eg5
  5'-terminal nucleic acid is a nucleoside, i.e. base + sugar but lacking 5'-phosphate
  modified_base 6, 9, 10, 11, 12, 16, 18: /mod_base = "2'-O-methyl corresponding base"
  modified_base 21: /mod_base = "5'-thio thymidine"
  modified_base 1, 2, 3, 4, 5, 7, 8, 13, 14, 15, 17, 19: /mod_base = "2'-hydroxy corresponding base"
agagacaauuccggaugugtt

SEQ ID NO: 312 - DNA, 21 bp, artificial sequence
  siRNA cross-reactive to human and rhesus monkey Eg5
  5'-terminal nucleic acid is a nucleoside, i.e. base + sugar but lacking 5'-phosphate
  modified_base 1, 3: /mod_base = "2'-O-methyl corresponding base"
  modified_base 21: /mod_base = "5'-thio thymidine"
  modified_base 2, 4, 5, 6, 7, 8, 9, 10, 11, 12, 13, 14, 15, 16, 17, 18, 19: /mod_base = "2'-hydroxy corresponding base"
cacauccggaauugucucutt

SEQ ID NO: 313 - DNA, 21 bp, artificial sequence
  siRNA cross-reactive to human and rhesus monkey Eg5
  5'-terminal nucleic acid is a nucleoside, i.e. base + sugar but lacking 5'-phosphate
  modified_base 1, 4, 5, 6, 7, 10, 13, 14, 18, 19: /mod_base = "2'-O-methyl corresponding base"
  modified_base 21: /mod_base = "5'-thio thymidine"
  modified_base 2, 3, 8, 9, 11, 12, 15, 16, 17: /mod_base = "2'-hydroxy corresponding base"
ugacuuugauagcuaaauutt

SEQ ID NO: 314 - DNA, 21 bp, artificial sequence
  siRNA cross-reactive to human and rhesus monkey Eg5
  5'-terminal nucleic acid is a nucleoside, i.e. base + sugar but lacking 5'-phosphate
  modified_base 5, 9, 12, 18: /mod_base = "2'-O-methyl corresponding base"
  modified_base 21: /mod_base = "5'-thio thymidine"
  modified_base 1, 2, 3, 4, 6, 7, 8, 10, 11, 13, 14, 15, 16, 17, 19: /mod_base = "2'-hydroxy corresponding base"
aauuuagcuaucaaagucatt

SEQ ID NO: 315 - DNA, 21 bp, artificial sequence
  siRNA cross-reactive to human and rhesus monkey Eg5
  5'-terminal nucleic acid is a nucleoside, i.e. base + sugar but lacking 5'-phosphate
  modified_base 1, 4, 9, 16, 17: /mod_base = "2'-O-methyl corresponding base"
  modified_base 21: /mod_base = "5'-thio thymidine"
  modified_base 2, 3, 5, 6, 7, 8, 10, 11, 12, 13, 14, 15, 18, 19: /mod_base = "2'-hydroxy corresponding base"
uggcagagcggaaagcuagtt

SEQ ID NO: 316 - DNA, 21 bp, artificial sequence
  siRNA cross-reactive to human and rhesus monkey Eg5
  5'-terminal nucleic acid is a nucleoside, i.e. base + sugar but lacking 5'-phosphate
  modified_base 2, 18: /mod_base = "2'-O-methyl corresponding base"
  modified_base 21: /mod_base = "5'-thio thymidine"
  modified_base 1, 3, 4, 5, 6, 7, 8, 9, 10, 11, 12, 13, 14, 15, 16, 17, 19: /mod_base = "2'-hydroxy corresponding base"
cuagcuuuccgcucugccatt

SEQ ID NO: 317 - DNA, 21 bp, artificial sequence
  siRNA cross-reactive to human and rhesus monkey Eg5
  5'-terminal nucleic acid is a nucleoside, i.e. base + sugar but lacking 5'-phosphate
  modified_base 4, 11, 12, 15, 17, 18, 19: /mod_base = "2'-O-methyl corresponding base"
  modified_base 21: /mod_base = "5'-thio thymidine"
  modified_base 1, 2, 3, 5, 6, 7, 8, 9, 10, 13, 14, 16: /mod_base = "2'-hydroxy corresponding base"
gagcggaaagcuagcgccctt

SEQ ID NO: 318 - DNA, 21 bp, artificial sequence
  siRNA cross-reactive to human and rhesus monkey Eg5
  5'-terminal nucleic acid is a nucleoside, i.e. base + sugar but lacking 5'-phosphate
  modified_base 7: /mod_base = "2'-O-methyl corresponding base"
  modified_base 21: /mod_base = "5'-thio thymidine"
  modified_base 1, 2, 3, 4, 5, 6, 8, 9, 10, 11, 12, 13, 14, 15, 16, 17, 18, 19: /mod_base = "2'-hydroxy corresponding base"
gggcgcuagcuuuccgcuctt

SEQ ID NO: 319 - DNA, 21 bp, artificial sequence
  siRNA cross-reactive to human and rhesus monkey Eg5
  5'-terminal nucleic acid is a nucleoside, i.e. base + sugar but lacking 5'-phosphate
  modified_base 8, 9, 12, 14, 16: /mod_base = "2'-O-methyl corresponding base"
  modified_base 21: /mod_base = "5'-thio thymidine"
  modified_base 1, 2, 3, 4, 5, 6, 7, 10, 11, 13, 15, 17, 18, 19: /mod_base = "2'-hydroxy corresponding base"
aaagaaguuaguguacgaatt

SEQ ID NO: 320 - DNA, 21 bp, artificial sequence
  siRNA cross-reactive to human and rhesus monkey Eg5
  5'-terminal nucleic acid is a nucleoside, i.e. base + sugar but lacking 5'-phosphate
  modified_base 5, 7, 10: /mod_base = "2'-O-methyl corresponding base"
  modified_base 21: /mod_base = "5'-thio thymidine"
  modified_base 1, 2, 3, 4, 6, 8, 9, 11, 12, 13, 14, 15, 16, 17, 18, 19: /mod_base = "2'-hydroxy corresponding base"
uucguacacuaacuucuuutt

SEQ ID NO: 321 - DNA, 21 bp, artificial sequence
  siRNA cross-reactive to human and rhesus monkey Eg5
  5'-terminal nucleic acid is a nucleoside, i.e. base + sugar but lacking 5'-phosphate
  modified_base 2, 3, 5, 7, 8, 10, 11, 12, 13, 14, 16, 18: /mod_base = "2'-O-methyl corresponding base"
  modified_base 21: /mod_base = "5'-thio thymidine"
  modified_base 1, 4, 6, 9, 15, 17, 19: /mod_base = "2'-hydroxy corresponding base"
auugcacuaucuuugcguatt

SEQ ID NO: 322 - DNA, 21 bp, artificial sequence
  siRNA cross-reactive to human and rhesus monkey Eg5
  5'-terminal nucleic acid is a nucleoside, i.e. base + sugar but lacking 5'-phosphate
  modified_base 1, 5, 11, 16: /mod_base = "2'-O-methyl corresponding base"
  modified_base 21: /mod_base = "5'-thio thymidine"
  modified_base 2, 3, 4, 6, 7, 8, 9, 10, 12, 13, 14, 15, 17, 18, 19: /mod_base = "2'-hydroxy corresponding base"
uacgcaaagauagugcaautt

SEQ ID NO: 323 - DNA, 21 bp, artificial sequence
  siRNA cross-reactive to human and rhesus monkey Eg5
  5'-terminal nucleic acid is a nucleoside, i.e. base + sugar but lacking 5'-phosphate
  modified_base 3, 5, 8, 9, 10, 11, 13, 15, 17, 18, 19: /mod_base = "2'-O-methyl corresponding base"
  modified_base 21: /mod_base = "5'-thio thymidine"
  modified_base 1, 2, 4, 6, 7, 12, 14, 16: /mod_base = "2'-hydroxy corresponding base"
gguauaauuccacguaccctt

SEQ ID NO: 324 - DNA, 21 bp, artificial sequence
  siRNA cross-reactive to human and rhesus monkey Eg5
  5'-terminal nucleic acid is a nucleoside, i.e. base + sugar but lacking 5'-phosphate
  modified_base 4, 14, 16: /mod_base = "2'-O-methyl corresponding base"
  modified_base 21: /mod_base = "5'-thio thymidine"
  modified_base 1, 2, 3, 5, 6, 7, 8, 9, 10, 11, 12, 13, 15, 17, 18, 19: /mod_base = "2'-hydroxy corresponding base"
ggguacguggaauuauacctt

SEQ ID NO: 325 - DNA, 21 bp, artificial sequence
  siRNA cross-reactive to human and rhesus monkey Eg5
  5'-terminal nucleic acid is a nucleoside, i.e. base + sugar but lacking 5'-phosphate
  modified_base 1, 3, 4, 5, 6, 9, 10, 12, 13, 14, 15, 16, 18, 19: /mod_base = "2'-O-methyl corresponding base"
  modified_base 21: /mod_base = "5'-thio thymidine"
  modified_base 2, 7, 8, 11, 17: /mod_base = "2'-hydroxy corresponding base"
uacucuagucguucccacutt

SEQ ID NO: 326 - DNA, 21 bp, artificial sequence
  siRNA cross-reactive to human and rhesus monkey Eg5
  5'-terminal nucleic acid is a nucleoside, i.e. base + sugar but lacking 5'-phosphate
  modified_base 13, 18: /mod_base = "2'-O-methyl corresponding base"
  modified_base 21: /mod_base = "5'-thio thymidine"
  modified_base 1, 2, 3, 4, 5, 6, 7, 8, 9, 10, 11, 12, 14, 15, 16, 17, 19: /mod_base = "2'-hydroxy corresponding base"
agugggaacgacuagaguatt

SEQ ID NO: 327 - DNA, 21 bp, artificial sequence
  siRNA cross-reactive to human and rhesus monkey Eg5
  5'-terminal nucleic acid is a nucleoside, i.e. base + sugar but lacking 5'-phosphate
  modified_base 1, 3, 12, 13, 15, 18, 19: /mod_base = "2'-O-methyl corresponding base"
  modified_base 21: /mod_base = "5'-thio thymidine"
  modified_base 2, 4, 5, 6, 7, 8, 9, 10, 11, 14, 16, 17: /mod_base = "2'-hydroxy corresponding base"
uaugaaagaaacuacgauutt

SEQ ID NO: 328 - DNA, 21 bp, artificial sequence
  siRNA cross-reactive to human and rhesus monkey Eg5
  5'-terminal nucleic acid is a nucleoside, i.e. base + sugar but lacking 5'-phosphate
  modified_base 6, 16, 18: /mod_base = "2'-O-methyl corresponding base"
  modified_base 21: /mod_base = "5'-thio thymidine"
  modified_base 1, 2, 3, 4, 5, 7, 8, 9, 10, 11, 12, 13, 14, 15, 17, 19: /mod_base = "2'-hydroxy corresponding base"
aaucguaguuucuuucauatt

SEQ ID NO: 329 - DNA, 21 bp, artificial sequence
  siRNA cross-reactive to human and rhesus monkey Eg5
  5'-terminal nucleic acid is a nucleoside, i.e. base + sugar but lacking 5'-phosphate
  modified_base 2, 4, 5, 11, 13, 15: /mod_base = "2'-O-methyl corresponding base"
  modified_base 21: /mod_base = "5'-thio thymidine"
  modified_base 1, 3, 6, 7, 8, 9, 10, 12, 14, 16, 17, 18, 19: /mod_base = "2'-hydroxy corresponding base"
augcuagaaguacauaagatt

SEQ ID NO: 330 - DNA, 21 bp, artificial sequence
  siRNA cross-reactive to human and rhesus monkey Eg5
  5'-terminal nucleic acid is a nucleoside, i.e. base + sugar but lacking 5'-phosphate
  modified_base 4, 8, 14, 17: /mod_base = "2'-O-methyl corresponding base"
  modified_base 21: /mod_base = "5'-thio thymidine"
  modified_base 1, 2, 3, 5, 6, 7, 9, 10, 11, 12, 13, 15, 16, 18, 19: /mod_base = "2'-hydroxy corresponding base"
ucuuauguacuucuagcautt

SEQ ID NO: 331 - DNA, 21 bp, artificial sequence
  siRNA cross-reactive to human and rhesus monkey Eg5
  5'-terminal nucleic acid is a nucleoside, i.e. base + sugar but lacking 5'-phosphate
  modified_base 4, 6, 8, 13, 14, 15, 16, 18, 19: /mod_base = "2'-O-methyl corresponding base"
  modified_base 21: /mod_base = "5'-thio thymidine"
  modified_base 1, 2, 3, 5, 7, 9, 10, 11, 12, 17: /mod_base = "2'-hydroxy corresponding base"
aaguacauaagaccuuauutt

SEQ ID NO: 332 - DNA, 21 bp, artificial sequence
  siRNA cross-reactive to human and rhesus monkey Eg5
  5'-terminal nucleic acid is a nucleoside, i.e. base + sugar but lacking 5'-phosphate
  modified_base 3, 11, 15: /mod_base = "2'-O-methyl corresponding base"
  modified_base 21: /mod_base = "5'-thio thymidine"
  modified_base 1, 2, 4, 5, 6, 7, 8, 9, 10, 12, 13, 14, 16, 17, 18, 19: /mod_base = "2'-hydroxy corresponding base"
aauaaggucuuauguacuutt

SEQ ID NO: 333 - DNA, 21 bp, artificial sequence
  siRNA cross-reactive to human and rhesus monkey Eg5
  5'-terminal nucleic acid is a nucleoside, i.e. base + sugar but lacking 5'-phosphate
  modified_base 2, 5, 6, 7, 11, 12, 14, 15, 18: /mod_base = "2'-O-methyl corresponding base"
  modified_base 21: /mod_base = "5'-thio thymidine"
  modified_base 1, 3, 4, 8, 9, 10, 13, 16, 17, 19: /mod_base = "2'-hydroxy corresponding base"
acagccugagcuguuaaugtt

SEQ ID NO: 334 - DNA, 21 bp, artificial sequence
  siRNA cross-reactive to human and rhesus monkey Eg5
  5'-terminal nucleic acid is a nucleoside, i.e. base + sugar but lacking 5'-phosphate
  modified_base 1, 4, 7, 12: /mod_base = "2'-O-methyl corresponding base"
  modified_base 21: /mod_base = "5'-thio thymidine"
  modified_base 2, 3, 5, 6, 8, 9, 10, 11, 13, 14, 15, 16, 17, 18, 19: /mod_base = "2'-hydroxy corresponding base"
cauuaacagcucaggcugutt

SEQ ID NO: 335 - DNA, 21 bp, artificial sequence
  siRNA cross-reactive to human and rhesus monkey Eg5
  5'-terminal nucleic acid is a nucleoside, i.e. base + sugar but lacking 5'-phosphate
  modified_base 11, 14, 15, 16, 17: /mod_base = "2'-O-methyl corresponding base"
  modified_base 21: /mod_base = "5'-thio thymidine"
  modified_base 1, 2, 3, 4, 5, 6, 7, 8, 9, 10, 12, 13, 18, 19: /mod_base = "2'-hydroxy corresponding base"
aaagaagagacaauuccggtt

SEQ ID NO: 336 - DNA, 21 bp, artificial sequence
  siRNA cross-reactive to human and rhesus monkey Eg5
  5'-terminal nucleic acid is a nucleoside, i.e. base + sugar but lacking 5'-phosphate
  modified_base 21: /mod_base = "5'-thio thymidine"
  modified_base 1..19: /mod_base = "2'-hydroxy corresponding base"
ccggaauugucucuucuuutt

SEQ ID NO: 337 - DNA, 21 bp, artificial sequence
  siRNA cross-reactive to human and rhesus monkey Eg5
  5'-terminal nucleic acid is a nucleoside, i.e. base + sugar but lacking 5'-phosphate
  modified_base 1, 3, 5, 6, 14, 15, 16: /mod_base = "2'-O-methyl corresponding base"
  modified_base 21: /mod_base = "5'-thio thymidine"
  modified_base 2, 4, 7, 8, 9, 10, 11, 12, 13, 17, 18, 19: /mod_base = "2'-hydroxy corresponding base"
cacacuggagaggucuaaatt

SEQ ID NO: 338 - DNA, 21 bp, artificial sequence
  siRNA cross-reactive to human and rhesus monkey Eg5
  5'-terminal nucleic acid is a nucleoside, i.e. base + sugar but lacking 5'-phosphate
  modified_base 3, 13: /mod_base = "2'-O-methyl corresponding base"
  modified_base 21: /mod_base = "5'-thio thymidine"
  modified_base 1, 2, 4, 5, 6, 7, 8, 9, 10, 11, 12, 14, 15, 16, 17, 18, 19: /mod_base = "2'-hydroxy corresponding base"
uuuagaccucuccagugugtt

SEQ ID NO: 339 - DNA, 21 bp, artificial sequence
  siRNA cross-reactive to human and rhesus monkey Eg5
  5'-terminal nucleic acid is a nucleoside, i.e. base + sugar but lacking 5'-phosphate
  modified_base 1, 3, 4, 12, 13, 14, 19: /mod_base = "2'-O-methyl corresponding base"
  modified_base 21: /mod_base = "5'-thio thymidine"
  modified_base 2, 5, 6, 7, 8, 9, 10, 11, 15, 16, 17, 18: /mod_base = "2'-hydroxy corresponding base"
cacuggagaggucuaaagutt

SEQ ID NO: 340 - DNA, 21 bp, artificial sequence
  siRNA cross-reactive to human and rhesus monkey Eg5
  5'-terminal nucleic acid is a nucleoside, i.e. base + sugar but lacking 5'-phosphate
  modified_base 5, 15: /mod_base = "2'-O-methyl corresponding base"
  modified_base 21: /mod_base = "5'-thio thymidine"
  modified_base 1, 2, 3, 4, 6, 7, 8, 9, 10, 11, 12, 13, 14, 16, 17, 18, 19: /mod_base = "2'-hydroxy corresponding base"
acuuuagaccucuccagugtt

SEQ ID NO: 341 - DNA, 21 bp, artificial sequence
  siRNA cross-reactive to human and rhesus monkey Eg5
  5'-terminal nucleic acid is a nucleoside, i.e. base + sugar but lacking 5'-phosphate
  modified_base 2, 3, 11, 12, 13, 18: /mod_base = "2'-O-methyl corresponding base"
  modified_base 21: /mod_base = "5'-thio thymidine"
  modified_base 1, 4, 5, 6, 7, 8, 9, 10, 14, 15, 16, 17, 19: /mod_base = "2'-hydroxy corresponding base"
acuggagaggucuaaagugtt

SEQ ID NO: 342 - DNA, 21 bp, artificial sequence
  siRNA cross-reactive to human and rhesus monkey Eg5
  5'-terminal nucleic acid is a nucleoside, i.e. base + sugar but lacking 5'-phosphate
  modified_base 1, 6, 16: /mod_base = "2'-O-methyl corresponding base"
  modified_base 21: /mod_base = "5'-thio thymidine"
  modified_base 2, 3, 4, 5, 7, 8, 9, 10, 11, 12, 13, 14, 15, 17, 18, 19: /mod_base = "2'-hydroxy corresponding base"
cacuuuagaccucuccagutt

SEQ ID NO: 343 - DNA, 21 bp, artificial sequence
  siRNA cross-reactive to human and rhesus monkey Eg5
  5'-terminal nucleic acid is a nucleoside, i.e. base + sugar but lacking 5'-phosphate
  modified_base 1, 3, 4, 6, 9, 10, 14, 15, 16, 18, 19: /mod_base = "2'-O-methyl corresponding base"
  modified_base 21: /mod_base = "5'-thio thymidine"
  modified_base 2, 5, 7, 8, 11, 12, 13, 17: /mod_base = "2'-hydroxy corresponding base"
cgucgcagccaaauucguctt

SEQ ID NO: 344 - DNA, 21 bp, artificial sequence
  siRNA cross-reactive to human and rhesus monkey Eg5
  5'-terminal nucleic acid is a nucleoside, i.e. base + sugar but lacking 5'-phosphate
  modified_base 21: /mod_base = "5'-thio thymidine"
  modified_base 1..19: /mod_base = "2'-hydroxy corresponding base"
gacgaauuuggcugcgacgtt

SEQ ID NO: 345 - DNA, 21 bp, artificial sequence
  siRNA cross-reactive to human and rhesus monkey Eg5
  5'-terminal nucleic acid is a nucleoside, i.e. base + sugar but lacking 5'-phosphate
  modified_base 6, 9, 10, 13, 14, 17, 19: /mod_base = "2'-O-methyl corresponding base"
  modified_base 21: /mod_base = "5'-thio thymidine"
  modified_base 1, 2, 3, 4, 5, 7, 8, 11, 12, 15, 16, 18: /mod_base = "2'-hydroxy corresponding base"
gaaggcaguugaccaacactt

SEQ ID NO: 346 - DNA, 21 bp, artificial sequence
  siRNA cross-reactive to human and rhesus monkey Eg5
  5'-terminal nucleic acid is a nucleoside, i.e. base + sugar but lacking 5'-phosphate
  modified_base 9: /mod_base = "2'-O-methyl corresponding base"
  modified_base 21: /mod_base = "5'-thio thymidine"
  modified_base 1, 2, 3, 4, 5, 6, 7, 8, 10, 11, 12, 13, 14, 15, 16, 17, 18, 19: /mod_base = "2'-hydroxy corresponding base"
guguuggucaacugccuuctt

SEQ ID NO: 347 - DNA, 21 bp, artificial sequence
  siRNA cross-reactive to human and rhesus monkey Eg5
  5'-terminal nucleic acid is a nucleoside, i.e. base + sugar but lacking 5'-phosphate
  modified_base 1, 3, 4, 5, 7, 8, 9, 10, 13, 18, 19: /mod_base = "2'-O-methyl corresponding base"
  modified_base 21: /mod_base = "5'-thio thymidine"
  modified_base 2, 6, 11, 12, 14, 15, 16, 17: /mod_base = "2'-hydroxy corresponding base"
cauucacccugacagaguutt

SEQ ID NO: 348 - DNA, 21 bp, artificial sequence
  siRNA cross-reactive to human and rhesus monkey Eg5
  5'-terminal nucleic acid is a nucleoside, i.e. base + sugar but lacking 5'-phosphate
  modified_base 9: /mod_base = "2'-O-methyl corresponding base"
  modified_base 21: /mod_base = "5'-thio thymidine"
  modified_base 1, 2, 3, 4, 5, 6, 7, 8, 10, 11, 12, 13, 14, 15, 16, 17, 18, 19: /mod_base = "2'-hydroxy corresponding base"
aacucugucagggugaaugtt

SEQ ID NO: 349 - DNA, 21 bp, artificial sequence
  siRNA cross-reactive to human and rhesus monkey Eg5
  5'-terminal nucleic acid is a nucleoside, i.e. base + sugar but lacking 5'-phosphate
  modified_base 7, 8, 9, 12, 13, 14, 16, 17, 18: /mod_base = "2'-O-methyl corresponding base"
  modified_base 21: /mod_base = "5'-thio thymidine"
  modified_base 1, 2, 3, 4, 5, 6, 10, 11, 15, 19: /mod_base = "2'-hydroxy corresponding base"
aagaggccuaacucauucatt

SEQ ID NO: 350 - DNA, 21 bp, artificial sequence
  siRNA cross-reactive to human and rhesus monkey Eg5
  5'-terminal nucleic acid is a nucleoside, i.e. base + sugar but lacking 5'-phosphate
  modified_base 10: /mod_base = "2'-O-methyl corresponding base"
  modified_base 21: /mod_base = "5'-thio thymidine"
  modified_base 1, 2, 3, 4, 5, 6, 7, 8, 9, 11, 12, 13, 14, 15, 16, 17, 18, 19: /mod_base = "2'-hydroxy corresponding base"
ugaaugaguuaggccucuutt

SEQ ID NO: 351 - DNA, 21 bp, artificial sequence
  siRNA cross-reactive to human and rhesus monkey Eg5
  5'-terminal nucleic acid is a nucleoside, i.e. base + sugar but lacking 5'-phosphate
  modified_base 5, 8, 9, 10, 11, 15, 17: /mod_base = "2'-O-methyl corresponding base"
  modified_base 21: /mod_base = "5'-thio thymidine"
  modified_base 1, 2, 3, 4, 6, 7, 12, 13, 14, 16, 18, 19: /mod_base = "2'-hydroxy corresponding base"
gagacaauuccggauguggtt

SEQ ID NO: 352 - DNA, 21 bp, artificial sequence
  siRNA cross-reactive to human and rhesus monkey Eg5
  5'-terminal nucleic acid is a nucleoside, i.e. base + sugar but lacking 5'-phosphate
  modified_base 2, 4: /mod_base = "2'-O-methyl corresponding base"
  modified_base 21: /mod_base = "5'-thio thymidine"
  modified_base 1, 3, 5, 6, 7, 8, 9, 10, 11, 12, 13, 14, 15, 16, 17, 18, 19: /mod_base = "2'-hydroxy corresponding base"
ccacauccggaauugucuctt

SEQ ID NO: 353 - DNA, 21 bp, artificial sequence
  siRNA cross-reactive to human and rhesus monkey Eg5
  5'-terminal nucleic acid is a nucleoside, i.e. base + sugar but lacking 5'-phosphate
  modified_base 1, 2, 3, 4, 8, 10, 14, 16: /mod_base = "2'-O-methyl corresponding base"
  modified_base 21: /mod_base = "5'-thio thymidine"
  modified_base 5, 6, 7, 9, 11, 12, 13, 15, 17, 18, 19: /mod_base = "2'-hydroxy corresponding base"
uuccggauguggauguagatt

SEQ ID NO: 354 - DNA, 21 bp, artificial sequence
  siRNA cross-reactive to human and rhesus monkey Eg5
  5'-terminal nucleic acid is a nucleoside, i.e. base + sugar but lacking 5'-phosphate
  modified_base 3, 5, 9, 11: /mod_base = "2'-O-methyl corresponding base"
  modified_base 21: /mod_base = "5'-thio thymidine"
  modified_base 1, 2, 4, 6, 7, 8, 10, 12, 13, 14, 15, 16, 17, 18, 19: /mod_base = "2'-hydroxy corresponding base"
ucuacauccacauccggaatt

SEQ ID NO: 355 - DNA, 21 bp, artificial sequence
  siRNA cross-reactive to human and rhesus monkey Eg5
  5'-terminal nucleic acid is a nucleoside, i.e. base + sugar but lacking 5'-phosphate
  modified_base 4, 5, 8, 10, 11, 12, 14, 15, 16, 19: /mod_base = "2'-O-methyl corresponding base"
  modified_base 21: /mod_base = "5'-thio thymidine"
  modified_base 1, 2, 3, 6, 7, 9, 13, 17, 18: /mod_base = "2'-hydroxy corresponding base"
aagcuagcgcccauucaautt

SEQ ID NO: 356 - DNA, 21 bp, artificial sequence
  siRNA cross-reactive to human and rhesus monkey Eg5
  5'-terminal nucleic acid is a nucleoside, i.e. base + sugar but lacking 5'-phosphate
  modified_base 14: /mod_base = "2'-O-methyl corresponding base"
  modified_base 21: /mod_base = "5'-thio thymidine"
  modified_base 1, 2, 3, 4, 5, 6, 7, 8, 9, 10, 11, 12, 13, 15, 16, 17, 18, 19: /mod_base = "2'-hydroxy corresponding base"
auugaaugggcgcuagcuutt

SEQ ID NO: 357 - DNA, 21 bp, artificial sequence
  siRNA cross-reactive to human and rhesus monkey Eg5
  5'-terminal nucleic acid is a nucleoside, i.e. base + sugar but lacking 5'-phosphate
  modified_base 5, 6, 9, 11, 13, 17, 18: /mod_base = "2'-O-methyl corresponding base"
  modified_base 21: /mod_base = "5'-thio thymidine"
  modified_base 1, 2, 3, 4, 7, 8, 10, 12, 14, 15, 16, 19: /mod_base = "2'-hydroxy corresponding base"
gaaguuaguguacgaacugtt

SEQ ID NO: 358 - DNA, 21 bp, artificial sequence
  siRNA cross-reactive to human and rhesus monkey Eg5
  5'-terminal nucleic acid is a nucleoside, i.e. base + sugar but lacking 5'-phosphate
  modified_base 1, 8, 10, 13: /mod_base = "2'-O-methyl corresponding base"
  modified_base 21: /mod_base = "5'-thio thymidine"
  modified_base 2, 3, 4, 5, 6, 7, 9, 11, 12, 14, 15, 16, 17, 18, 19: /mod_base = "2'-hydroxy corresponding base"
caguucguacacuaacuuctt

SEQ ID NO: 359 - DNA, 21 bp, artificial sequence
  siRNA cross-reactive to human and rhesus monkey Eg5
  5'-terminal nucleic acid is a nucleoside, i.e. base + sugar but lacking 5'-phosphate
  modified_base 1, 3, 6, 7, 8, 9, 11, 13, 15, 16, 17, 18, 19: /mod_base = "2'-O-methyl corresponding base"
  modified_base 21: /mod_base = "5'-thio thymidine"
  modified_base 2, 4, 5, 10, 12, 14: /mod_base = "2'-hydroxy corresponding base"
uauaauuccacguacccuutt

SEQ ID NO: 360 - DNA, 21 bp, artificial sequence
  siRNA cross-reactive to human and rhesus monkey Eg5
  5'-terminal nucleic acid is a nucleoside, i.e. base + sugar but lacking 5'-phosphate
  modified_base 6, 16, 18: /mod_base = "2'-O-methyl corresponding base"
  modified_base 21: /mod_base = "5'-thio thymidine"
  modified_base 1, 2, 3, 4, 5, 7, 8, 9, 10, 11, 12, 13, 14, 15, 17, 19: /mod_base = "2'-hydroxy corresponding base"
aaggguacguggaauuauatt

SEQ ID NO: 361 - DNA, 21 bp, artificial sequence
  siRNA cross-reactive to human and rhesus monkey Eg5
  5'-terminal nucleic acid is a nucleoside, i.e. base + sugar but lacking 5'-phosphate
  modified_base 2, 5, 8, 9, 12, 17: /mod_base = "2'-O-methyl corresponding base"
  modified_base 21: /mod_base = "5'-thio thymidine"
  modified_base 1, 3, 4, 6, 7, 10, 11, 13, 14, 15, 16, 18, 19: /mod_base = "2'-hydroxy corresponding base"
acaguggccgauaagauagtt

SEQ ID NO: 362 - DNA, 21 bp, artificial sequence
  siRNA cross-reactive to human and rhesus monkey Eg5
  5'-terminal nucleic acid is a nucleoside, i.e. base + sugar but lacking 5'-phosphate
  modified_base 2, 7, 14: /mod_base = "2'-O-methyl corresponding base"
  modified_base 21: /mod_base = "5'-thio thymidine"
  modified_base 1, 3, 4, 5, 6, 8, 9, 10, 11, 12, 13, 15, 16, 17, 18, 19: /mod_base = "2'-hydroxy corresponding base"
cuaucuuaucggccacugutt

SEQ ID NO: 363 - DNA, 21 bp, artificial sequence
  siRNA cross-reactive to human and rhesus monkey Eg5
  5'-terminal nucleic acid is a nucleoside, i.e. base + sugar but lacking 5'-phosphate
  modified_base 1, 2, 3, 5, 6, 8, 9, 10, 11, 12, 14, 17, 18, 19: /mod_base = "2'-O-methyl corresponding base"
  modified_base 21: /mod_base = "5'-thio thymidine"
  modified_base 4, 7, 13, 15, 16: /mod_base = "2'-hydroxy corresponding base"
ucugucaucccuauaguuctt

SEQ ID NO: 364 - DNA, 21 bp, artificial sequence
  siRNA cross-reactive to human and rhesus monkey Eg5
  5'-terminal nucleic acid is a nucleoside, i.e. base + sugar but lacking 5'-phosphate
  modified_base 5, 7, 16: /mod_base = "2'-O-methyl corresponding base"
  modified_base 21: /mod_base = "5'-thio thymidine"
  modified_base 1, 2, 3, 4, 6, 8, 9, 10, 11, 12, 13, 14, 15, 17, 18, 19: /mod_base = "2'-hydroxy corresponding base"
gaacuauagggaugacagatt

SEQ ID NO: 365 - DNA, 21 bp, artificial sequence
  siRNA cross-reactive to human and rhesus monkey Eg5
  5'-terminal nucleic acid is a nucleoside, i.e. base + sugar but lacking 5'-phosphate
  modified_base 1, 2, 3, 4, 5, 7, 8, 10, 13, 14, 15, 17, 19: /mod_base = "2'-O-methyl corresponding base"
  modified_base 21: /mod_base = "5'-thio thymidine"
  modified_base 6, 9, 11, 12, 16, 18: /mod_base = "2'-hydroxy corresponding base"
uucuugcuaugacuugugutt

SEQ ID NO: 366 - DNA, 21 bp, artificial sequence
  siRNA cross-reactive to human and rhesus monkey Eg5
  5'-terminal nucleic acid is a nucleoside, i.e. base + sugar but lacking 5'-phosphate
  modified_base 2, 4, 9, 11, 14: /mod_base = "2'-O-methyl corresponding base"
  modified_base 21: /mod_base = "5'-thio thymidine"
  modified_base 1, 3, 5, 6, 7, 8, 10, 12, 13, 15, 16, 17, 18, 19: /mod_base = "2'-hydroxy corresponding base"
acacaagucauagcaagaatt

SEQ ID NO: 367 - DNA, 21 bp, artificial sequence
  siRNA cross-reactive to human and rhesus monkey Eg5
  5'-terminal nucleic acid is a nucleoside, i.e. base + sugar but lacking 5'-phosphate
  modified_base 2, 10, 13, 14, 17, 18: /mod_base = "2'-O-methyl corresponding base"
  modified_base 21: /mod_base = "5'-thio thymidine"
  modified_base 1, 3, 4, 5, 6, 7, 8, 9, 11, 12, 15, 16, 19: /mod_base = "2'-hydroxy corresponding base"
guaagaaggcaguugaccatt

SEQ ID NO: 368 - DNA, 21 bp, artificial sequence
  siRNA cross-reactive to human and rhesus monkey Eg5
  5'-terminal nucleic acid is a nucleoside, i.e. base + sugar but lacking 5'-phosphate
  modified_base 5, 17: /mod_base = "2'-O-methyl corresponding base"
  modified_base 21: /mod_base = "5'-thio thymidine"
  modified_base 1, 2, 3, 4, 6, 7, 8, 9, 10, 11, 12, 13, 14, 15, 16, 18, 19: /mod_base = "2'-hydroxy corresponding base"
uggucaacugccuucuuactt

SEQ ID NO: 369 - DNA, 21 bp, artificial sequence
  siRNA cross-reactive to human and rhesus monkey Eg5
  5'-terminal nucleic acid is a nucleoside, i.e. base + sugar but lacking 5'-phosphate
  modified_base 1, 3, 4, 7, 10, 13, 14, 17: /mod_base = "2'-O-methyl corresponding base"
  modified_base 21: /mod_base = "5'-thio thymidine"
  modified_base 2, 5, 6, 8, 9, 11, 12, 15, 16, 18, 19: /mod_base = "2'-hydroxy corresponding base"
cauugacaguggccgauaatt

SEQ ID NO: 370 - DNA, 21 bp, artificial sequence
  siRNA cross-reactive to human and rhesus monkey Eg5
  5'-terminal nucleic acid is a nucleoside, i.e. base + sugar but lacking 5'-phosphate
  modified_base 2, 9, 15: /mod_base = "2'-O-methyl corresponding base"
  modified_base 21: /mod_base = "5'-thio thymidine"
  modified_base 1, 3, 4, 5, 6, 7, 8, 10, 11, 12, 13, 14, 16, 17, 18, 19: /mod_base = "2'-hydroxy corresponding base"
uuaucggccacugucaaugtt

SEQ ID NO: 371 - DNA, 21 bp, artificial sequence
  siRNA cross-reactive to human and rhesus monkey Eg5
  5'-terminal nucleic acid is a nucleoside, i.e. base + sugar but lacking 5'-phosphate
  modified_base 6, 7, 9, 10, 11, 14, 17, 19: /mod_base = "2'-O-methyl corresponding base"
  modified_base 21: /mod_base = "5'-thio thymidine"
  modified_base 1, 2, 3, 4, 5, 8, 12, 13, 15, 16, 18: /mod_base = "2'-hydroxy corresponding base"
agaaaccacuuaguagugutt

SEQ ID NO: 372 - DNA, 21 bp, artificial sequence
  siRNA cross-reactive to human and rhesus monkey Eg5
  5'-terminal nucleic acid is a nucleoside, i.e. base + sugar but lacking 5'-phosphate
  modified_base 2, 5, 8: /mod_base = "2'-O-methyl corresponding base"
  modified_base 21: /mod_base = "5'-thio thymidine"
  modified_base 1, 3, 4, 6, 7, 9, 10, 11, 12, 13, 14, 15, 16, 17, 18, 19: /mod_base = "2'-hydroxy corresponding base"
acacuacuaagugguuucutt

SEQ ID NO: 373 - DNA, 21 bp, artificial sequence
  siRNA cross-reactive to human and rhesus monkey Eg5
  5'-terminal nucleic acid is a nucleoside, i.e. base + sugar but lacking 5'-phosphate
  modified_base 4, 5, 7, 8, 9, 11, 12, 15, 16, 19: /mod_base = "2'-O-methyl corresponding base"
  modified_base 21: /mod_base = "5'-thio thymidine"
  modified_base 1, 2, 3, 6, 10, 13, 14, 17, 18: /mod_base = "2'-hydroxy corresponding base"
ggauuguucaucaauuggctt

SEQ ID NO: 374 - DNA, 21 bp, artificial sequence
  siRNA cross-reactive to human and rhesus monkey Eg5
  5'-terminal nucleic acid is a nucleoside, i.e. base + sugar but lacking 5'-phosphate
  modified_base 3, 14: /mod_base = "2'-O-methyl corresponding base"
  modified_base 21: /mod_base = "5'-thio thymidine"
  modified_base 1, 2, 4, 5, 6, 7, 8, 9, 10, 11, 12, 13, 15, 16, 17, 18, 19: /mod_base = "2'-hydroxy corresponding base"
gccaauugaugaacaaucctt

SEQ ID NO: 375 - DNA, 21 bp, artificial sequence
  siRNA cross-reactive to human and rhesus monkey Eg5
  5'-terminal nucleic acid is a nucleoside, i.e. base + sugar but lacking 5'-phosphate
  modified_base 1, 8, 9, 10, 13, 14, 15, 17, 18, 19: /mod_base = "2'-O-methyl corresponding base"
  modified_base 21: /mod_base = "5'-thio thymidine"
  modified_base 2, 3, 4, 5, 6, 7, 11, 12, 16: /mod_base = "2'-hydroxy corresponding base"
uaagaggccuaacucauuctt

SEQ ID NO: 376 - DNA, 21 bp, artificial sequence
  siRNA cross-reactive to human and rhesus monkey Eg5
  5'-terminal nucleic acid is a nucleoside, i.e. base + sugar but lacking 5'-phosphate
  modified_base 9, 18: /mod_base = "2'-O-methyl corresponding base"
  modified_base 21: /mod_base = "5'-thio thymidine"
  modified_base 1, 2, 3, 4, 5, 6, 7, 8, 10, 11, 12, 13, 14, 15, 16, 17, 19: /mod_base = "2'-hydroxy corresponding base"
gaaugaguuaggccucuuatt

SEQ ID NO: 377 - DNA, 21 bp, artificial sequence
  siRNA cross-reactive to human and rhesus monkey Eg5
  5'-terminal nucleic acid is a nucleoside, i.e. base + sugar but lacking 5'-phosphate
  modified_base 3, 4, 7, 9, 11, 15, 16: /mod_base = "2'-O-methyl corresponding base"
  modified_base 21: /mod_base = "5'-thio thymidine"
  modified_base 1, 2, 5, 6, 8, 10, 12, 13, 14, 17, 18, 19: /mod_base = "2'-hydroxy corresponding base"
aguuaguguacgaacuggatt

SEQ ID NO: 378 - DNA, 21 bp, artificial sequence
  siRNA cross-reactive to human and rhesus monkey Eg5
  5'-terminal nucleic acid is a nucleoside, i.e. base + sugar but lacking 5'-phosphate
  modified_base 3, 10, 12, 15: /mod_base = "2'-O-methyl corresponding base"
  modified_base 21: /mod_base = "5'-thio thymidine"
  modified_base 1, 2, 4, 5, 6, 7, 8, 9, 11, 13, 14, 16, 17, 18, 19: /mod_base = "2'-hydroxy corresponding base"
uccaguucguacacuaacutt

SEQ ID NO: 379 - DNA, 21 bp, artificial sequence
  siRNA cross-reactive to human and rhesus monkey Eg5
  5'-terminal nucleic acid is a nucleoside, i.e. base + sugar but lacking 5'-phosphate
  modified_base 3, 5, 7, 12, 13, 14, 15, 17, 18, 19: /mod_base = "2'-O-methyl corresponding base"
  modified_base 21: /mod_base = "5'-thio thymidine"
  modified_base 1, 2, 4, 6, 8, 9, 10, 11, 16: /mod_base = "2'-hydroxy corresponding base"
aguacauaagaccuuauuutt

SEQ ID NO: 380 - DNA, 21 bp, artificial sequence
  siRNA cross-reactive to human and rhesus monkey Eg5
  5'-terminal nucleic acid is a nucleoside, i.e. base + sugar but lacking 5'-phosphate
  modified_base 4, 12, 16: /mod_base = "2'-O-methyl corresponding base"
  modified_base 21: /mod_base = "5'-thio thymidine"
  modified_base 1, 2, 3, 5, 6, 7, 8, 9, 10, 11, 13, 14, 15, 17, 18, 19: /mod_base = "2'-hydroxy corresponding base"
aaauaaggucuuauguacutt

SEQ ID NO: 381 - DNA, 21 bp, artificial sequence
  siRNA cross-reactive to human and rhesus monkey Eg5
  5'-terminal nucleic acid is a nucleoside, i.e. base + sugar but lacking 5'-phosphate
  modified_base 1, 5, 6, 7, 8, 10, 12, 14, 18, 19: /mod_base = "2'-O-methyl corresponding base"
  modified_base 21: /mod_base = "5'-thio thymidine"
  modified_base 2, 3, 4, 9, 11, 13, 15, 16, 17: /mod_base = "2'-hydroxy corresponding base"
ugagccuuguguauagauutt

SEQ ID NO: 382 - DNA, 21 bp, artificial sequence
  siRNA cross-reactive to human and rhesus monkey Eg5
  5'-terminal nucleic acid is a nucleoside, i.e. base + sugar but lacking 5'-phosphate
  modified_base 5, 7, 9, 11, 18: /mod_base = "2'-O-methyl corresponding base"
  modified_base 21: /mod_base = "5'-thio thymidine"
  modified_base 1, 2, 3, 4, 6, 8, 10, 12, 13, 14, 15, 16, 17, 19: /mod_base = "2'-hydroxy corresponding base"
aaucuauacacaaggcucatt

SEQ ID NO: 383 - DNA, 21 bp, artificial sequence
  siRNA cross-reactive to human and rhesus monkey Eg5
  5'-terminal nucleic acid is a nucleoside, i.e. base + sugar but lacking 5'-phosphate
  modified_base 1, 2, 3, 4, 5, 12, 13, 14, 17, 18, 19: /mod_base = "2'-O-methyl corresponding base"
  modified_base 21: /mod_base = "5'-thio thymidine"
  modified_base 6, 7, 8, 9, 10, 11, 15, 16: /mod_base = "2'-hydroxy corresponding base"
ccuuuaagaggccuaacuctt

SEQ ID NO: 384 - DNA, 21 bp, artificial sequence
  siRNA cross-reactive to human and rhesus monkey Eg5
  5'-terminal nucleic acid is a nucleoside, i.e. base + sugar but lacking 5'-phosphate
  modified_base 5, 14: /mod_base = "2'-O-methyl corresponding base"
  modified_base 21: /mod_base = "5'-thio thymidine"
  modified_base 1, 2, 3, 4, 6, 7, 8, 9, 10, 11, 12, 13, 15, 16, 17, 18, 19: /mod_base = "2'-hydroxy corresponding base"
gaguuaggccucuuaaaggtt

SEQ ID NO: 385 - DNA, 21 bp, artificial sequence
  siRNA cross-reactive to human and rhesus monkey Eg5
  5'-terminal nucleic acid is a nucleoside, i.e. base + sugar but lacking 5'-phosphate
  modified_base 2, 3, 5, 6, 7, 10, 13, 15, 16, 17: /mod_base = "2'-O-methyl corresponding base"
  modified_base 21: /mod_base = "5'-thio thymidine"
  modified_base 1, 4, 8, 9, 11, 12, 14, 18, 19: /mod_base = "2'-hydroxy corresponding base"
accacuuaguaguguccagtt

SEQ ID NO: 386 - DNA, 21 bp, artificial sequence
  siRNA cross-reactive to human and rhesus monkey Eg5
  5'-terminal nucleic acid is a nucleoside, i.e. base + sugar but lacking 5'-phosphate
  modified_base 6, 9, 12: /mod_base = "2'-O-methyl corresponding base"
  modified_base 21: /mod_base = "5'-thio thymidine"
  modified_base 1, 2, 3, 4, 5, 7, 8, 10, 11, 13, 14, 15, 16, 17, 18, 19: /mod_base = "2'-hydroxy corresponding base"
cuggacacuacuaaguggutt

SEQ ID NO: 387 - DNA, 21 bp, artificial sequence
  siRNA cross-reactive to human and rhesus monkey Eg5
  5'-terminal nucleic acid is a nucleoside, i.e. base + sugar but lacking 5'-phosphate
  modified_base 5, 6, 7, 8, 9, 12, 13, 15, 17, 18, 19: /mod_base = "2'-O-methyl corresponding base"
  modified_base 21: /mod_base = "5'-thio thymidine"
  modified_base 1, 2, 3, 4, 10, 11, 14, 16: /mod_base = "2'-hydroxy corresponding base"
gaaacuuccaauuaugucutt

SEQ ID NO: 388 - DNA, 21 bp, artificial sequence
  siRNA cross-reactive to human and rhesus monkey Eg5
  5'-terminal nucleic acid is a nucleoside, i.e. base + sugar but lacking 5'-phosphate
  modified_base 4, 6: /mod_base = "2'-O-methyl corresponding base"
  modified_base 21: /mod_base = "5'-thio thymidine"
  modified_base 1, 2, 3, 5, 7, 8, 9, 10, 11, 12, 13, 14, 15, 16, 17, 18, 19: /mod_base = "2'-hydroxy corresponding base"
agacauaauuggaaguuuctt

SEQ ID NO: 389 - DNA, 21 bp, artificial sequence
  siRNA cross-reactive to human and rhesus monkey Eg5
  5'-terminal nucleic acid is a nucleoside, i.e. base + sugar but lacking 5'-phosphate
  modified_base 1, 3, 5, 7, 8, 9, 10, 13, 14, 16, 17, 18, 19: /mod_base = "2'-O-methyl corresponding base"
  modified_base 21: /mod_base = "5'-thio thymidine"
  modified_base 2, 4, 6, 11, 12, 15: /mod_base = "2'-hydroxy corresponding base"
ugcauacucuagucguucctt

SEQ ID NO: 390 - DNA, 21 bp, artificial sequence
  siRNA cross-reactive to human and rhesus monkey Eg5
  5'-terminal nucleic acid is a nucleoside, i.e. base + sugar but lacking 5'-phosphate
  modified_base 9, 14, 18: /mod_base = "2'-O-methyl corresponding base"
  modified_base 21: /mod_base = "5'-thio thymidine"
  modified_base 1, 2, 3, 4, 5, 6, 7, 8, 10, 11, 12, 13, 15, 16, 17, 19: /mod_base = "2'-hydroxy corresponding base"
ggaacgacuagaguaugcatt

SEQ ID NO: 391 - DNA, 21 bp, artificial sequence
  siRNA cross-reactive to human and rhesus monkey Eg5
  5'-terminal nucleic acid is a nucleoside, i.e. base + sugar but lacking 5'-phosphate
  modified_base 7, 10, 11, 14, 15, 18: /mod_base = "2'-O-methyl corresponding base"
  modified_base 21: /mod_base = "5'-thio thymidine"
  modified_base 1, 2, 3, 4, 5, 6, 8, 9, 12, 13, 16, 17, 19: /mod_base = "2'-hydroxy corresponding base"
agaaggcaguugaccaacatt

SEQ ID NO: 392 - DNA, 21 bp, artificial sequence
  siRNA cross-reactive to human and rhesus monkey Eg5
  5'-terminal nucleic acid is a nucleoside, i.e. base + sugar but lacking 5'-phosphate
  modified_base 8: /mod_base = "2'-O-methyl corresponding base"
  modified_base 21: /mod_base = "5'-thio thymidine"
  modified_base 1, 2, 3, 4, 5, 6, 7, 9, 10, 11, 12, 13, 14, 15, 16, 17, 18, 19: /mod_base = "2'-hydroxy corresponding base"
uguuggucaacugccuucutt

SEQ ID NO: 393 - DNA, 21 bp, artificial sequence
  siRNA cross-reactive to human and rhesus monkey Eg5
  5'-terminal nucleic acid is a nucleoside, i.e. base + sugar but lacking 5'-phosphate
  modified_base 2, 4, 6, 11, 12, 13, 14, 16, 17, 18: /mod_base = "2'-O-methyl corresponding base"
  modified_base 21: /mod_base = "5'-thio thymidine"
  modified_base 1, 3, 5, 7, 8, 9, 10, 15, 19: /mod_base = "2'-hydroxy corresponding base"
guacauaagaccuuauuugtt

SEQ ID NO: 394 - DNA, 21 bp, artificial sequence
  siRNA cross-reactive to human and rhesus monkey Eg5
  5'-terminal nucleic acid is a nucleoside, i.e. base + sugar but lacking 5'-phosphate
  modified_base 1, 5, 13, 17: /mod_base = "2'-O-methyl corresponding base"
  modified_base 21: /mod_base = "5'-thio thymidine"
  modified_base 2, 3, 4, 6, 7, 8, 9, 10, 11, 12, 14, 15, 16, 18, 19: /mod_base = "2'-hydroxy corresponding base"
caaauaaggucuuauguactt

SEQ ID NO: 395 - DNA, 21 bp, artificial sequence
  siRNA cross-reactive to human and rhesus monkey Eg5
  5'-terminal nucleic acid is a nucleoside, i.e. base + sugar but lacking 5'-phosphate
  modified_base 1, 3, 6, 7, 9, 11, 12, 14, 15, 16, 17, 18: /mod_base = "2'-O-methyl corresponding base"
  modified_base 21: /mod_base = "5'-thio thymidine"
  modified_base 2, 4, 5, 8, 10, 13, 19: /mod_base = "2'-hydroxy corresponding base"
uauaauugcacuaucuuugtt

SEQ ID NO: 396 - DNA, 21 bp, artificial sequence
  siRNA cross-reactive to human and rhesus monkey Eg5
  5'-terminal nucleic acid is a nucleoside, i.e. base + sugar but lacking 5'-phosphate
  modified_base 1, 7, 12, 16, 18: /mod_base = "2'-O-methyl corresponding base"
  modified_base 21: /mod_base = "5'-thio thymidine"
  modified_base 2, 3, 4, 5, 6, 8, 9, 10, 11, 13, 14, 15, 17, 19: /mod_base = "2'-hydroxy corresponding base"
caaagauagugcaauuauatt

SEQ ID NO: 397 - DNA, 21 bp, artificial sequence
  siRNA cross-reactive to human and rhesus monkey Eg5
  5'-terminal nucleic acid is a nucleoside, i.e. base + sugar but lacking 5'-phosphate
  modified_base 1, 2, 3, 4, 5, 7, 8, 10, 13, 15, 17, 19: /mod_base = "2'-O-methyl corresponding base"
  modified_base 21: /mod_base = "5'-thio thymidine"
  modified_base 6, 9, 11, 12, 14, 16, 18: /mod_base = "2'-hydroxy corresponding base"
ucucuguuacaauacauautt

SEQ ID NO: 398 - DNA, 21 bp, artificial sequence
  siRNA cross-reactive to human and rhesus monkey Eg5
  5'-terminal nucleic acid is a nucleoside, i.e. base + sugar but lacking 5'-phosphate
  modified_base 2, 6, 11, 14: /mod_base = "2'-O-methyl corresponding base"
  modified_base 21: /mod_base = "5'-thio thymidine"
  modified_base 1, 3, 4, 5, 7, 8, 9, 10, 12, 13, 15, 16, 17, 18, 19: /mod_base = "2'-hydroxy corresponding base"
auauguauuguaacagagatt

SEQ ID NO: 399 - DNA, 21 bp, artificial sequence
  siRNA cross-reactive to human and rhesus monkey Eg5
  5'-terminal nucleic acid is a nucleoside, i.e. base + sugar but lacking 5'-phosphate
  modified_base 1, 3, 5, 6, 7, 9, 14: /mod_base = "2'-O-methyl corresponding base"
  modified_base 21: /mod_base = "5'-thio thymidine"
  modified_base 2, 4, 8, 10, 11, 12, 13, 15, 16, 17, 18, 19: /mod_base = "2'-hydroxy corresponding base"
uaugcucauagagcaaagatt

SEQ ID NO: 400 - DNA, 21 bp, artificial sequence
  siRNA cross-reactive to human and rhesus monkey Eg5
  5'-terminal nucleic acid is a nucleoside, i.e. base + sugar but lacking 5'-phosphate
  modified_base 10, 16, 18: /mod_base = "2'-O-methyl corresponding base"
  modified_base 21: /mod_base = "5'-thio thymidine"
  modified_base 1, 2, 3, 4, 5, 6, 7, 8, 9, 11, 12, 13, 14, 15, 17, 19: /mod_base = "2'-hydroxy corresponding base"
ucuuugcucuaugagcauatt

SEQ ID NO: 401 - DNA, 21 bp, artificial sequence
  siRNA cross-reactive to human and rhesus monkey Eg5
  5'-terminal nucleic acid is a nucleoside, i.e. base + sugar but lacking 5'-phosphate
  modified_base 1, 3, 4, 6, 7, 8, 10, 11, 12, 15, 16, 17, 18: /mod_base = "2'-O-methyl corresponding base"
  modified_base 21: /mod_base = "5'-thio thymidine"
  modified_base 2, 5, 9, 13, 14, 19: /mod_base = "2'-hydroxy corresponding base"
uguuguuuguccaauucugtt

SEQ ID NO: 402 - DNA, 21 bp, artificial sequence
  siRNA cross-reactive to human and rhesus monkey Eg5
  5'-terminal nucleic acid is a nucleoside, i.e. base + sugar but lacking 5'-phosphate
  modified_base 1, 11, 15, 18: /mod_base = "2'-O-methyl corresponding base"
  modified_base 21: /mod_base = "5'-thio thymidine"
  modified_base 2, 3, 4, 5, 6, 7, 8, 9, 10, 12, 13, 14, 16, 17, 19: /mod_base = "2'-hydroxy corresponding base"
cagaauuggacaaacaacatt

SEQ ID NO: 403 - DNA, 21 bp, artificial sequence
  siRNA cross-reactive to human and rhesus monkey Eg5
  5'-terminal nucleic acid is a nucleoside, i.e. base + sugar but lacking 5'-phosphate
  modified_base 2, 3, 6, 7, 12, 13, 14, 15, 16, 17: /mod_base = "2'-O-methyl corresponding base"
  modified_base 21: /mod_base = "5'-thio thymidine"
  modified_base 1, 4, 5, 8, 9, 10, 11, 18, 19: /mod_base = "2'-hydroxy corresponding base"
acuaacuagaauccuccagtt

SEQ ID NO: 404 - DNA, 21 bp, artificial sequence
  siRNA cross-reactive to human and rhesus monkey Eg5
  5'-terminal nucleic acid is a nucleoside, i.e. base + sugar but lacking 5'-phosphate
  modified_base 12, 16: /mod_base = "2'-O-methyl corresponding base"
  modified_base 21: /mod_base = "5'-thio thymidine"
  modified_base 1, 2, 3, 4, 5, 6, 7, 8, 9, 10, 11, 13, 14, 15, 17, 18, 19: /mod_base = "2'-hydroxy corresponding base"
cuggaggauucuaguuagutt

SEQ ID NO: 405 - DNA, 21 bp, artificial sequence
  siRNA cross-reactive to human and rhesus monkey Eg5
  5'-terminal nucleic acid is a nucleoside, i.e. base + sugar but lacking 5'-phosphate
  modified_base 1, 3, 6, 8, 9, 10, 12, 14, 15: /mod_base = "2'-O-methyl corresponding base"
  modified_base 21: /mod_base = "5'-thio thymidine"
  modified_base 2, 4, 5, 7, 11, 13, 16, 17, 18, 19: /mod_base = "2'-hydroxy corresponding base"
uguggugucuauacugaaatt

SEQ ID NO: 406 - DNA, 21 bp, artificial sequence
  siRNA cross-reactive to human and rhesus monkey Eg5
  5'-terminal nucleic acid is a nucleoside, i.e. base + sugar but lacking 5'-phosphate
  modified_base 4, 7, 9, 13, 16, 18: /mod_base = "2'-O-methyl corresponding base"
  modified_base 21: /mod_base = "5'-thio thymidine"
  modified_base 1, 2, 3, 5, 6, 8, 10, 11, 12, 14, 15, 17, 19: /mod_base = "2'-hydroxy corresponding base"
uuucaguauagacaccacatt

SEQ ID NO: 407 - DNA, 21 bp, artificial sequence
  siRNA cross-reactive to human and rhesus monkey Eg5
  5'-terminal nucleic acid is a nucleoside, i.e. base + sugar but lacking 5'-phosphate
  modified_base 1, 3, 4, 6, 13, 14, 16, 17, 18: /mod_base = "2'-O-methyl corresponding base"
  modified_base 21: /mod_base = "5'-thio thymidine"
  modified_base 2, 5, 7, 8, 9, 10, 11, 12, 15, 19: /mod_base = "2'-hydroxy corresponding base"
uauuaugggagaccacccatt

SEQ ID NO: 408 - DNA, 21 bp, artificial sequence
  siRNA cross-reactive to human and rhesus monkey Eg5
  5'-terminal nucleic acid is a nucleoside, i.e. base + sugar but lacking 5'-phosphate
  modified_base 13, 15, 18: /mod_base = "2'-O-methyl corresponding base"
  modified_base 21: /mod_base = "5'-thio thymidine"
  modified_base 1, 2, 3, 4, 5, 6, 7, 8, 9, 10, 11, 12, 14, 16, 17, 19: /mod_base = "2'-hydroxy corresponding base"
uggguggucucccauaauatt

SEQ ID NO: 409 - DNA, 21 bp, artificial sequence
  siRNA cross-reactive to human and rhesus monkey Eg5
  5'-terminal nucleic acid is a nucleoside, i.e. base + sugar but lacking 5'-phosphate
  modified_base 6, 11, 12, 13, 15, 16: /mod_base = "2'-O-methyl corresponding base"
  modified_base 21: /mod_base = "5'-thio thymidine"
  modified_base 1, 2, 3, 4, 5, 7, 8, 9, 10, 14, 17, 18, 19: /mod_base = "2'-hydroxy corresponding base"
aaggaugaagucuaucaaatt

SEQ ID NO: 410 - DNA, 21 bp, artificial sequence
  siRNA cross-reactive to human and rhesus monkey Eg5
  5'-terminal nucleic acid is a nucleoside, i.e. base + sugar but lacking 5'-phosphate
  modified_base 6, 13: /mod_base = "2'-O-methyl corresponding base"
  modified_base 21: /mod_base = "5'-thio thymidine"
  modified_base 1, 2, 3, 4, 5, 7, 8, 9, 10, 11, 12, 14, 15, 16, 17, 18, 19: /mod_base = "2'-hydroxy corresponding base"
uuugauagacuucauccuutt

SEQ ID NO: 411 - DNA, 21 bp, artificial sequence
  siRNA cross-reactive to human and rhesus monkey Eg5
  5'-terminal nucleic acid is a nucleoside, i.e. base + sugar but lacking 5'-phosphate
  modified_base 1, 2, 5, 13, 14, 15: /mod_base = "2'-O-methyl corresponding base"
  modified_base 21: /mod_base = "5'-thio thymidine"
  modified_base 3, 4, 6, 7, 8, 9, 10, 11, 12, 16, 17, 18, 19: /mod_base = "2'-hydroxy corresponding base"
uugauaagagagcucgggatt

SEQ ID NO: 412 - DNA, 21 bp, artificial sequence
  siRNA cross-reactive to human and rhesus monkey Eg5
  5'-terminal nucleic acid is a nucleoside, i.e. base + sugar but lacking 5'-phosphate
  modified_base 14, 17: /mod_base = "2'-O-methyl corresponding base"
  modified_base 21: /mod_base = "5'-thio thymidine"
  modified_base 1, 2, 3, 4, 5, 6, 7, 8, 9, 10, 11, 12, 13, 15, 16, 18, 19: /mod_base = "2'-hydroxy corresponding base"
ucccgagcucucuuaucaatt

SEQ ID NO: 413 - DNA, 21 bp, artificial sequence
  siRNA cross-reactive to human and rhesus monkey Eg5
  5'-terminal nucleic acid is a nucleoside, i.e. base + sugar but lacking 5'-phosphate
  modified_base 2, 4, 5, 6, 7, 8, 9, 11, 12, 18, 19: /mod_base = "2'-O-methyl corresponding base"
  modified_base 21: /mod_base = "5'-thio thymidine"
  modified_base 1, 3, 10, 13, 14, 15, 16, 17: /mod_base = "2'-hydroxy corresponding base"
auguuccuuaucgagaauctt

SEQ ID NO: 414 - DNA, 21 bp, artificial sequence
  siRNA cross-reactive to human and rhesus monkey Eg5
  5'-terminal nucleic acid is a nucleoside, i.e. base + sugar but lacking 5'-phosphate
  modified_base 10, 17: /mod_base = "2'-O-methyl corresponding base"
  modified_base 21: /mod_base = "5'-thio thymidine"
  modified_base 1, 2, 3, 4, 5, 6, 7, 8, 9, 11, 12, 13, 14, 15, 16, 18, 19: /mod_base = "2'-hydroxy corresponding base"
gauucucgauaaggaacautt

SEQ ID NO: 415 - DNA, 21 bp, artificial sequence
  siRNA cross-reactive to human and rhesus monkey Eg5
  5'-terminal nucleic acid is a nucleoside, i.e. base + sugar but lacking 5'-phosphate
  modified_base 5, 7, 9, 10, 11, 13, 18: /mod_base = "2'-O-methyl corresponding base"
  modified_base 21: /mod_base = "5'-thio thymidine"
  modified_base 1, 2, 3, 4, 6, 8, 12, 14, 15, 16, 17, 19: /mod_base = "2'-hydroxy corresponding base"
ggaauaugcucauagagcatt

SEQ ID NO: 416 - DNA, 21 bp, artificial sequence
  siRNA cross-reactive to human and rhesus monkey Eg5
  5'-terminal nucleic acid is a nucleoside, i.e. base + sugar but lacking 5'-phosphate
  modified_base 6, 12, 14: /mod_base = "2'-O-methyl corresponding base"
  modified_base 21: /mod_base = "5'-thio thymidine"
  modified_base 1, 2, 3, 4, 5, 7, 8, 9, 10, 11, 13, 15, 16, 17, 18, 19: /mod_base = "2'-hydroxy corresponding base"
ugcucuaugagcauauucctt

SEQ ID NO: 417 - DNA, 21 bp, artificial sequence
  siRNA cross-reactive to human and rhesus monkey Eg5
  5'-terminal nucleic acid is a nucleoside, i.e. base + sugar but lacking 5'-phosphate
  modified_base 1, 2, 4, 5, 6, 7, 11, 12, 16, 17, 19: /mod_base = "2'-O-methyl corresponding base"
  modified_base 21: /mod_base = "5'-thio thymidine"
  modified_base 3, 8, 9, 10, 13, 14, 15, 18: /mod_base = "2'-hydroxy corresponding base"
ccauuccaaacuggaucgutt

SEQ ID NO: 418 - DNA, 21 bp, artificial sequence
  siRNA cross-reactive to human and rhesus monkey Eg5
  5'-terminal nucleic acid is a nucleoside, i.e. base + sugar but lacking 5'-phosphate
  modified_base 7: /mod_base = "2'-O-methyl corresponding base"
  modified_base 21: /mod_base = "5'-thio thymidine"
  modified_base 1, 2, 3, 4, 5, 6, 8, 9, 10, 11, 12, 13, 14, 15, 16, 17, 18, 19: /mod_base = "2'-hydroxy corresponding base"
acgauccaguuuggaauggtt

SEQ ID NO: 419 - DNA, 21 bp, artificial sequence
  siRNA cross-reactive to human and rhesus monkey Eg5
  5'-terminal nucleic acid is a nucleoside, i.e. base + sugar but lacking 5'-phosphate
  modified_base 3, 6, 7, 10, 11, 14, 16, 19: /mod_base = "2'-O-methyl corresponding base"
  modified_base 21: /mod_base = "5'-thio thymidine"
  modified_base 1, 2, 4, 5, 8, 9, 12, 13, 15, 17, 18: /mod_base = "2'-hydroxy corresponding base"
ggcaguugaccaacacaautt

SEQ ID NO: 420 - DNA, 21 bp, artificial sequence
  siRNA cross-reactive to human and rhesus monkey Eg5
  5'-terminal nucleic acid is a nucleoside, i.e. base + sugar but lacking 5'-phosphate
  modified_base 12: /mod_base = "2'-O-methyl corresponding base"
  modified_base 21: /mod_base = "5'-thio thymidine"
  modified_base 1, 2, 3, 4, 5, 6, 7, 8, 9, 10, 11, 13, 14, 15, 16, 17, 18, 19: /mod_base = "2'-hydroxy corresponding base"
auuguguuggucaacugcctt

SEQ ID NO: 421 - DNA, 21 bp, artificial sequence
  siRNA cross-reactive to human and rhesus monkey Eg5
  5'-terminal nucleic acid is a nucleoside, i.e. base + sugar but lacking 5'-phosphate
  modified_base 1, 3, 5, 6, 12, 14, 16: /mod_base = "2'-O-methyl corresponding base"
  modified_base 21: /mod_base = "5'-thio thymidine"
  modified_base 2, 4, 7, 8, 9, 10, 11, 13, 15, 17, 18, 19: /mod_base = "2'-hydroxy corresponding base"
caugcuagaaguacauaagtt

SEQ ID NO: 422 - DNA, 21 bp, artificial sequence
  siRNA cross-reactive to human and rhesus monkey Eg5
  5'-terminal nucleic acid is a nucleoside, i.e. base + sugar but lacking 5'-phosphate
  modified_base 3, 7, 13, 16: /mod_base = "2'-O-methyl corresponding base"
  modified_base 21: /mod_base = "5'-thio thymidine"
  modified_base 1, 2, 4, 5, 6, 8, 9, 10, 11, 12, 14, 15, 17, 18, 19: /mod_base = "2'-hydroxy corresponding base"
cuuauguacuucuagcaugtt

SEQ ID NO: 423 - DNA, 21 bp, artificial sequence
  siRNA cross-reactive to human and rhesus monkey Eg5
  5'-terminal nucleic acid is a nucleoside, i.e. base + sugar but lacking 5'-phosphate
  modified_base 1, 2, 8, 10, 12, 17, 18, 19: /mod_base = "2'-O-methyl corresponding base"
  modified_base 21: /mod_base = "5'-thio thymidine"
  modified_base 3, 4, 5, 6, 7, 9, 11, 13, 14, 15, 16: /mod_base = "2'-hydroxy corresponding base"
cuagaaguacauaagaccutt

SEQ ID NO: 424 - DNA, 21 bp, artificial sequence
  siRNA cross-reactive to human and rhesus monkey Eg5
  5'-terminal nucleic acid is a nucleoside, i.e. base + sugar but lacking 5'-phosphate
  modified_base 7, 11, 17: /mod_base = "2'-O-methyl corresponding base"
  modified_base 21: /mod_base = "5'-thio thymidine"
  modified_base 1, 2, 3, 4, 5, 6, 8, 9, 10, 12, 13, 14, 15, 16, 18, 19: /mod_base = "2'-hydroxy corresponding base"
aggucuuauguacuucuagtt

SEQ ID NO: 425 - DNA, 21 bp, artificial sequence
  siRNA cross-reactive to human and rhesus monkey Eg5
  5'-terminal nucleic acid is a nucleoside, i.e. base + sugar but lacking 5'-phosphate
  modified_base 1, 2, 6, 7, 8, 9, 10, 11, 13, 15, 16, 17, 19: /mod_base = "2'-O-methyl corresponding base"
  modified_base 21: /mod_base = "5'-thio thymidine"
  modified_base 3, 4, 5, 12, 14, 18: /mod_base = "2'-hydroxy corresponding base"
uuggaucucucacaucuautt

SEQ ID NO: 426 - DNA, 21 bp, artificial sequence
  siRNA cross-reactive to human and rhesus monkey Eg5
  5'-terminal nucleic acid is a nucleoside, i.e. base + sugar but lacking 5'-phosphate
  modified_base 2, 17: /mod_base = "2'-O-methyl corresponding base"
  modified_base 21: /mod_base = "5'-thio thymidine"
  modified_base 1, 3, 4, 5, 6, 7, 8, 9, 10, 11, 12, 13, 14, 15, 16, 18, 19: /mod_base = "2'-hydroxy corresponding base"
auagaugugagagauccaatt

SEQ ID NO: 427 - DNA, 21 bp, artificial sequence
  siRNA cross-reactive to human and rhesus monkey Eg5
  5'-terminal nucleic acid is a nucleoside, i.e. base + sugar but lacking 5'-phosphate
  modified_base 3, 4, 6, 9, 11, 12, 13, 15, 17, 18: /mod_base = "2'-O-methyl corresponding base"
  modified_base 21: /mod_base = "5'-thio thymidine"
  modified_base 1, 2, 5, 7, 8, 10, 14, 16, 19: /mod_base = "2'-hydroxy corresponding base"
aacuguggugucuauacugtt

SEQ ID NO: 428 - DNA, 21 bp, artificial sequence
  siRNA cross-reactive to human and rhesus monkey Eg5
  5'-terminal nucleic acid is a nucleoside, i.e. base + sugar but lacking 5'-phosphate
  modified_base 1, 4, 6, 10, 13, 15: /mod_base = "2'-O-methyl corresponding base"
  modified_base 21: /mod_base = "5'-thio thymidine"
  modified_base 2, 3, 5, 7, 8, 9, 11, 12, 14, 16, 17, 18, 19: /mod_base = "2'-hydroxy corresponding base"
caguauagacaccacaguutt

SEQ ID NO: 429 - DNA, 21 bp, artificial sequence
  siRNA cross-reactive to human and rhesus monkey Eg5
  5'-terminal nucleic acid is a nucleoside, i.e. base + sugar but lacking 5'-phosphate
  modified_base 1, 2, 4, 5, 8, 11, 14, 15, 18: /mod_base = "2'-O-methyl corresponding base"
  modified_base 21: /mod_base = "5'-thio thymidine"
  modified_base 3, 6, 7, 9, 10, 12, 13, 16, 17, 19: /mod_base = "2'-hydroxy corresponding base"
ucauugacaguggccgauatt

SEQ ID NO: 430 - DNA, 21 bp, artificial sequence
  siRNA cross-reactive to human and rhesus monkey Eg5
  5'-terminal nucleic acid is a nucleoside, i.e. base + sugar but lacking 5'-phosphate
  modified_base 1, 8, 14: /mod_base = "2'-O-methyl corresponding base"
  modified_base 21: /mod_base = "5'-thio thymidine"
  modified_base 2, 3, 4, 5, 6, 7, 9, 10, 11, 12, 13, 15, 16, 17, 18, 19: /mod_base = "2'-hydroxy corresponding base"
uaucggccacugucaaugatt

SEQ ID NO: 431 - DNA, 21 bp, artificial sequence
  siRNA cross-reactive to human and rhesus monkey Eg5
  5'-terminal nucleic acid is a nucleoside, i.e. base + sugar but lacking 5'-phosphate
  modified_base 2, 7, 11, 12, 13, 15, 16, 17, 18, 19: /mod_base = "2'-O-methyl corresponding base"
  modified_base 21: /mod_base = "5'-thio thymidine"
  modified_base 1, 3, 4, 5, 6, 8, 9, 10, 14: /mod_base = "2'-hydroxy corresponding base"
auaaagcagacccauuccctt

SEQ ID NO: 432 - DNA, 21 bp, artificial sequence
  siRNA cross-reactive to human and rhesus monkey Eg5
  5'-terminal nucleic acid is a nucleoside, i.e. base + sugar but lacking 5'-phosphate
  modified_base 17: /mod_base = "2'-O-methyl corresponding base"
  modified_base 21: /mod_base = "5'-thio thymidine"
  modified_base 1, 2, 3, 4, 5, 6, 7, 8, 9, 10, 11, 12, 13, 14, 15, 16, 18, 19: /mod_base = "2'-hydroxy corresponding base"
gggaaugggucugcuuuautt

SEQ ID NO: 433 - DNA, 21 bp, artificial sequence
  siRNA cross-reactive to human and rhesus monkey Eg5
  5'-terminal nucleic acid is a nucleoside, i.e. base + sugar but lacking 5'-phosphate
  modified_base 2, 8, 9, 11, 12, 13, 16, 19: /mod_base = "2'-O-methyl corresponding base"
  modified_base 21: /mod_base = "5'-thio thymidine"
  modified_base 1, 3, 4, 5, 6, 7, 10, 14, 15, 17, 18: /mod_base = "2'-hydroxy corresponding base"
acagaaaccacuuaguagutt

SEQ ID NO: 434 - DNA, 21 bp, artificial sequence
  siRNA cross-reactive to human and rhesus monkey Eg5
  5'-terminal nucleic acid is a nucleoside, i.e. base + sugar but lacking 5'-phosphate
  modified_base 3, 6: /mod_base = "2'-O-methyl corresponding base"
  modified_base 21: /mod_base = "5'-thio thymidine"
  modified_base 1, 2, 4, 5, 7, 8, 9, 10, 11, 12, 13, 14, 15, 16, 17, 18, 19: /mod_base = "2'-hydroxy corresponding base"
acuacuaagugguuucugutt

SEQ ID NO: 435 - DNA, 21 bp, artificial sequence
  siRNA cross-reactive to human and rhesus monkey Eg5
  5'-terminal nucleic acid is a nucleoside, i.e. base + sugar but lacking 5'-phosphate
  modified_base 5, 6, 8, 9, 10, 13, 16, 18, 19: /mod_base = "2'-O-methyl corresponding base"
  modified_base 21: /mod_base = "5'-thio thymidine"
  modified_base 1, 2, 3, 4, 7, 11, 12, 14, 15, 17: /mod_base = "2'-hydroxy corresponding base"
gaaaccacuuaguaguguctt

SEQ ID NO: 436 - DNA, 21 bp, artificial sequence
  siRNA cross-reactive to human and rhesus monkey Eg5
  5'-terminal nucleic acid is a nucleoside, i.e. base + sugar but lacking 5'-phosphate
  modified_base 3, 6, 9: /mod_base = "2'-O-methyl corresponding base"
  modified_base 21: /mod_base = "5'-thio thymidine"
  modified_base 1, 2, 4, 5, 7, 8, 10, 11, 12, 13, 14, 15, 16, 17, 18, 19: /mod_base = "2'-hydroxy corresponding base"
gacacuacuaagugguuuctt

SEQ ID NO: 437 - DNA, 21 bp, artificial sequence
  siRNA cross-reactive to human and rhesus monkey Eg5
  5'-terminal nucleic acid is a nucleoside, i.e. base + sugar but lacking 5'-phosphate
  modified_base 4, 5, 6, 12, 14, 17, 18: /mod_base = "2'-O-methyl corresponding base"
  modified_base 21: /mod_base = "5'-thio thymidine"
  modified_base 1, 2, 3, 7, 8, 9, 10, 11, 13, 15, 16, 19: /mod_base = "2'-hydroxy corresponding base"
aaaucuaaggauauagucatt

SEQ ID NO: 438 - DNA, 21 bp, artificial sequence
  siRNA cross-reactive to human and rhesus monkey Eg5
  5'-terminal nucleic acid is a nucleoside, i.e. base + sugar but lacking 5'-phosphate
  modified_base 5, 7, 13: /mod_base = "2'-O-methyl corresponding base"
  modified_base 21: /mod_base = "5'-thio thymidine"
  modified_base 1, 2, 3, 4, 6, 8, 9, 10, 11, 12, 14, 15, 16, 17, 18, 19: /mod_base = "2'-hydroxy corresponding base"
ugacuauauccuuagauuutt

SEQ ID NO: 439 - DNA, 21 bp, artificial sequence
  siRNA cross-reactive to human and rhesus monkey Eg5
  5'-terminal nucleic acid is a nucleoside, i.e. base + sugar but lacking 5'-phosphate
  modified_base 1, 2, 4, 5, 6, 8, 10, 11, 12, 14, 15, 18: /mod_base = "2'-O-methyl corresponding base"
  modified_base 21: /mod_base = "5'-thio thymidine"
  modified_base 3, 7, 9, 13, 16, 17, 19: /mod_base = "2'-hydroxy corresponding base"
uuauuuauacccaucaacatt

SEQ ID NO: 440 - DNA, 21 bp, artificial sequence
  siRNA cross-reactive to human and rhesus monkey Eg5
  5'-terminal nucleic acid is a nucleoside, i.e. base + sugar but lacking 5'-phosphate
  modified_base 11, 13, 17: /mod_base = "2'-O-methyl corresponding base"
  modified_base 21: /mod_base = "5'-thio thymidine"
  modified_base 1, 2, 3, 4, 5, 6, 7, 8, 9, 10, 12, 14, 15, 16, 18, 19: /mod_base = "2'-hydroxy corresponding base"
uguugauggguauaaauaatt

SEQ ID NO: 441 - DNA, 21 bp, artificial sequence
  siRNA cross-reactive to human and rhesus monkey Eg5
  5'-terminal nucleic acid is a nucleoside, i.e. base + sugar but lacking 5'-phosphate
  modified_base 2, 8, 10, 11, 14, 16, 18, 19: /mod_base = "2'-O-methyl corresponding base"
  modified_base 21: /mod_base = "5'-thio thymidine"
  modified_base 1, 3, 4, 5, 6, 7, 9, 12, 13, 15, 17: /mod_base = "2'-hydroxy corresponding base"
acagaggcauuaacacacutt

SEQ ID NO: 442 - DNA, 21 bp, artificial sequence
  siRNA cross-reactive to human and rhesus monkey Eg5
  5'-terminal nucleic acid is a nucleoside, i.e. base + sugar but lacking 5'-phosphate
  modified_base 8: /mod_base = "2'-O-methyl corresponding base"
  modified_base 21: /mod_base = "5'-thio thymidine"
  modified_base 1, 2, 3, 4, 5, 6, 7, 9, 10, 11, 12, 13, 14, 15, 16, 17, 18, 19: /mod_base = "2'-hydroxy corresponding base"
aguguguuaaugccucugutt

SEQ ID NO: 443 - DNA, 21 bp, artificial sequence
  siRNA cross-reactive to human and rhesus monkey Eg5
  5'-terminal nucleic acid is a nucleoside, i.e. base + sugar but lacking 5'-phosphate
  modified_base 2, 4, 6, 7, 15, 16, 17: /mod_base = "2'-O-methyl corresponding base"
  modified_base 21: /mod_base = "5'-thio thymidine"
  modified_base 1, 3, 5, 8, 9, 10, 11, 12, 13, 14, 18, 19: /mod_base = "2'-hydroxy corresponding base"
acacacuggagaggucuaatt

SEQ ID NO: 444 - DNA, 21 bp, artificial sequence
  siRNA cross-reactive to human and rhesus monkey Eg5
  5'-terminal nucleic acid is a nucleoside, i.e. base + sugar but lacking 5'-phosphate
  modified_base 2, 12: /mod_base = "2'-O-methyl corresponding base"
  modified_base 21: /mod_base = "5'-thio thymidine"
  modified_base 1, 3, 4, 5, 6, 7, 8, 9, 10, 11, 13, 14, 15, 16, 17, 18, 19: /mod_base = "2'-hydroxy corresponding base"
uuagaccucuccagugugutt

SEQ ID NO: 445 - DNA, 21 bp, artificial sequence
  siRNA cross-reactive to human and rhesus monkey Eg5
  5'-terminal nucleic acid is a nucleoside, i.e. base + sugar but lacking 5'-phosphate
  modified_base 2, 4, 5, 13, 14, 15: /mod_base = "2'-O-methyl corresponding base"
  modified_base 21: /mod_base = "5'-thio thymidine"
  modified_base 1, 3, 6, 7, 8, 9, 10, 11, 12, 16, 17, 18, 19: /mod_base = "2'-hydroxy corresponding base"
acacuggagaggucuaaagtt

SEQ ID NO: 446 - DNA, 21 bp, artificial sequence
  siRNA cross-reactive to human and rhesus monkey Eg5
  5'-terminal nucleic acid is a nucleoside, i.e. base + sugar but lacking 5'-phosphate
  modified_base 4, 14: /mod_base = "2'-O-methyl corresponding base"
  modified_base 21: /mod_base = "5'-thio thymidine"
  modified_base 1, 2, 3, 5, 6, 7, 8, 9, 10, 11, 12, 13, 15, 16, 17, 18, 19: /mod_base = "2'-hydroxy corresponding base"
cuuuagaccucuccagugutt

SEQ ID NO: 447 - DNA, 21 bp, artificial sequence
  siRNA cross-reactive to human and rhesus monkey Eg5
  5'-terminal nucleic acid is a nucleoside, i.e. base + sugar but lacking 5'-phosphate
  modified_base 1, 5, 6, 7, 11, 12, 15, 16, 17, 18, 19: /mod_base = "2'-O-methyl corresponding base"
  modified_base 21: /mod_base = "5'-thio thymidine"
  modified_base 2, 3, 4, 8, 9, 10, 13, 14: /mod_base = "2'-hydroxy corresponding base"
cgagcccagaucaaccuuutt

SEQ ID NO: 448 - DNA, 21 bp, artificial sequence
  siRNA cross-reactive to human and rhesus monkey Eg5
  5'-terminal nucleic acid is a nucleoside, i.e. base + sugar but lacking 5'-phosphate
  modified_base 21: /mod_base = "5'-thio thymidine"
  modified_base 1..19: /mod_base = "2'-hydroxy corresponding base"
aaagguugaucugggcucgtt

SEQ ID NO: 449 - DNA, 21 bp, artificial sequence
  siRNA cross-reactive to human and rhesus monkey Eg5
  5'-terminal nucleic acid is a nucleoside, i.e. base + sugar but lacking 5'-phosphate
  modified_base 1, 2, 3, 4, 5, 7, 8, 9, 10, 12, 13, 14, 15, 16, 17, 18, 19: /mod_base = "2'-O-methyl corresponding base"
  modified_base 21: /mod_base = "5'-thio thymidine"
  modified_base 6, 11: /mod_base = "2'-hydroxy corresponding base"
ucccuauuucgcuuucucctt

SEQ ID NO: 450 - DNA, 21 bp, artificial sequence
  siRNA cross-reactive to human and rhesus monkey Eg5
  5'-terminal nucleic acid is a nucleoside, i.e. base + sugar but lacking 5'-phosphate
  modified_base 14: /mod_base = "2'-O-methyl corresponding base"
  modified_base 21: /mod_base = "5'-thio thymidine"
  modified_base 1, 2, 3, 4, 5, 6, 7, 8, 9, 10, 11, 12, 13, 15, 16, 17, 18, 19: /mod_base = "2'-hydroxy corresponding base"
ggagaaagcgaaauagggatt

SEQ ID NO: 451 - DNA, 21 bp, artificial sequence
  siRNA cross-reactive to human and rhesus monkey Eg5
  5'-terminal nucleic acid is a nucleoside, i.e. base + sugar but lacking 5'-phosphate
  modified_base 1, 2, 3, 8, 9, 11, 12, 14, 15, 18: /mod_base = "2'-O-methyl corresponding base"
  modified_base 21: /mod_base = "5'-thio thymidine"
  modified_base 4, 5, 6, 7, 10, 13, 16, 17, 19: /mod_base = "2'-hydroxy corresponding base"
ucuaaaaucacugucaacatt

SEQ ID NO: 452 - DNA, 21 bp, artificial sequence
  siRNA cross-reactive to human and rhesus monkey Eg5
  5'-terminal nucleic acid is a nucleoside, i.e. base + sugar but lacking 5'-phosphate
  modified_base 7, 16: /mod_base = "2'-O-methyl corresponding base"
  modified_base 21: /mod_base = "5'-thio thymidine"
  modified_base 1, 2, 3, 4, 5, 6, 8, 9, 10, 11, 12, 13, 14, 15, 17, 18, 19: /mod_base = "2'-hydroxy corresponding base"
uguugacagugauuuuagatt

SEQ ID NO: 453 - DNA, 21 bp, artificial sequence
  siRNA cross-reactive to human and rhesus monkey Eg5
  5'-terminal nucleic acid is a nucleoside, i.e. base + sugar but lacking 5'-phosphate
  modified_base 3, 4, 8, 9, 10, 12, 13, 14, 16: /mod_base = "2'-O-methyl corresponding base"
  modified_base 21: /mod_base = "5'-thio thymidine"
  modified_base 1, 2, 5, 6, 7, 11, 15, 17, 18, 19: /mod_base = "2'-hydroxy corresponding base"
agccaaauucgucugcgaatt

SEQ ID NO: 454 - DNA, 21 bp, artificial sequence
  siRNA cross-reactive to human and rhesus monkey Eg5
  5'-terminal nucleic acid is a nucleoside, i.e. base + sugar but lacking 5'-phosphate
  modified_base 5: /mod_base = "2'-O-methyl corresponding base"
  modified_base 21: /mod_base = "5'-thio thymidine"
  modified_base 1, 2, 3, 4, 6, 7, 8, 9, 10, 11, 12, 13, 14, 15, 16, 17, 18, 19: /mod_base = "2'-hydroxy corresponding base"
uucgcagacgaauuuggcutt

SEQ ID NO: 455 - DNA, 21 bp, artificial sequence
  siRNA cross-reactive to human and rhesus monkey Eg5
  5'-terminal nucleic acid is a nucleoside, i.e. base + sugar but lacking 5'-phosphate
  modified_base 1, 2, 3, 5, 6, 7, 10, 13, 18: /mod_base = "2'-O-methyl corresponding base"
  modified_base 21: /mod_base = "5'-thio thymidine"
  modified_base 4, 8, 9, 11, 12, 14, 15, 16, 17, 19: /mod_base = "2'-hydroxy corresponding base"
cccauucaauaguagaaugtt

SEQ ID NO: 456 - DNA, 21 bp, artificial sequence
  siRNA cross-reactive to human and rhesus monkey Eg5
  5'-terminal nucleic acid is a nucleoside, i.e. base + sugar but lacking 5'-phosphate
  modified_base 1, 6, 9: /mod_base = "2'-O-methyl corresponding base"
  modified_base 21: /mod_base = "5'-thio thymidine"
  modified_base 2, 3, 4, 5, 7, 8, 10, 11, 12, 13, 14, 15, 16, 17, 18, 19: /mod_base = "2'-hydroxy corresponding base"
cauucuacuauugaaugggtt

SEQ ID NO: 457 - DNA, 21 bp, artificial sequence
  siRNA cross-reactive to human and rhesus monkey Eg5
  5'-terminal nucleic acid is a nucleoside, i.e. base + sugar but lacking 5'-phosphate
  modified_base 3, 7, 9, 11, 13, 14, 15, 16, 19: /mod_base = "2'-O-methyl corresponding base"
  modified_base 21: /mod_base = "5'-thio thymidine"
  modified_base 1, 2, 4, 5, 6, 8, 10, 12, 17, 18: /mod_base = "2'-hydroxy corresponding base"
gaugaaugcauacucuagutt

SEQ ID NO: 458 - DNA, 21 bp, artificial sequence
  siRNA cross-reactive to human and rhesus monkey Eg5
  5'-terminal nucleic acid is a nucleoside, i.e. base + sugar but lacking 5'-phosphate
  modified_base 3, 8, 12, 16: /mod_base = "2'-O-methyl corresponding base"
  modified_base 21: /mod_base = "5'-thio thymidine"
  modified_base 1, 2, 4, 5, 6, 7, 9, 10, 11, 13, 14, 15, 17, 18, 19: /mod_base = "2'-hydroxy corresponding base"
acuagaguaugcauucauctt

SEQ ID NO: 459 - DNA, 21 bp, artificial sequence
  siRNA cross-reactive to human and rhesus monkey Eg5
  5'-terminal nucleic acid is a nucleoside, i.e. base + sugar but lacking 5'-phosphate
  modified_base 1, 2, 3, 5, 7, 8, 9, 10, 11, 12, 14, 15: /mod_base = "2'-O-methyl corresponding base"
  modified_base 21: /mod_base = "5'-thio thymidine"
  modified_base 4, 6, 13, 16, 17, 18, 19: /mod_base = "2'-hydroxy corresponding base"
cucauguuccuuaucgagatt

SEQ ID NO: 460 - DNA, 21 bp, artificial sequence
  siRNA cross-reactive to human and rhesus monkey Eg5
  5'-terminal nucleic acid is a nucleoside, i.e. base + sugar but lacking 5'-phosphate
  modified_base 7, 14: /mod_base = "2'-O-methyl corresponding base"
  modified_base 21: /mod_base = "5'-thio thymidine"
  modified_base 1, 2, 3, 4, 5, 6, 8, 9, 10, 11, 12, 13, 15, 16, 17, 18, 19: /mod_base = "2'-hydroxy corresponding base"
ucucgauaaggaacaugagtt

SEQ ID NO: 461 - DNA, 21 bp, artificial sequence
  siRNA cross-reactive to human and rhesus monkey Eg5
  5'-terminal nucleic acid is a nucleoside, i.e. base + sugar but lacking 5'-phosphate
  modified_base 6, 7, 8, 12, 13, 16, 17: /mod_base = "2'-O-methyl corresponding base"
  modified_base 21: /mod_base = "5'-thio thymidine"
  modified_base 1, 2, 3, 4, 5, 9, 10, 11, 14, 15, 18, 19: /mod_base = "2'-hydroxy corresponding base"
gagaaucuaaacuaacuagtt

SEQ ID NO: 462 - DNA, 21 bp, artificial sequence
  siRNA cross-reactive to human and rhesus monkey Eg5
  5'-terminal nucleic acid is a nucleoside, i.e. base + sugar but lacking 5'-phosphate
  modified_base 2, 6, 11: /mod_base = "2'-O-methyl corresponding base"
  modified_base 21: /mod_base = "5'-thio thymidine"
  modified_base 1, 3, 4, 5, 7, 8, 9, 10, 12, 13, 14, 15, 16, 17, 18, 19: /mod_base = "2'-hydroxy corresponding base"
cuaguuaguuuagauucuctt

SEQ ID NO: 463 - DNA, 21 bp, artificial sequence
  siRNA cross-reactive to human and rhesus monkey Eg5
  5'-terminal nucleic acid is a nucleoside, i.e. base + sugar but lacking 5'-phosphate
  modified_base 1, 7, 9, 11, 16, 17, 18, 19: /mod_base = "2'-O-methyl corresponding base"
  modified_base 21: /mod_base = "5'-thio thymidine"
  modified_base 2, 3, 4, 5, 6, 8, 10, 12, 13, 14, 15: /mod_base = "2'-hydroxy corresponding base"
uagaaguacauaagaccuutt

SEQ ID NO: 464 - DNA, 21 bp, artificial sequence
  siRNA cross-reactive to human and rhesus monkey Eg5
  5'-terminal nucleic acid is a nucleoside, i.e. base + sugar but lacking 5'-phosphate
  modified_base 8, 12, 18: /mod_base = "2'-O-methyl corresponding base"
  modified_base 21: /mod_base = "5'-thio thymidine"
  modified_base 1, 2, 3, 4, 5, 6, 7, 9, 10, 11, 13, 14, 15, 16, 17, 19: /mod_base = "2'-hydroxy corresponding base"
aaggucuuauguacuucuatt

SEQ ID NO: 465 - DNA, 21 bp, artificial sequence
  siRNA cross-reactive to human and rhesus monkey Eg5
  5'-terminal nucleic acid is a nucleoside, i.e. base + sugar but lacking 5'-phosphate
  modified_base 1, 4, 5, 6, 10, 11, 13, 14, 17: /mod_base = "2'-O-methyl corresponding base"
  modified_base 21: /mod_base = "5'-thio thymidine"
  modified_base 2, 3, 7, 8, 9, 12, 15, 16, 18, 19: /mod_base = "2'-hydroxy corresponding base"
cagccugagcuguuaaugatt

SEQ ID NO: 466 - DNA, 21 bp, artificial sequence
  siRNA cross-reactive to human and rhesus monkey Eg5
  5'-terminal nucleic acid is a nucleoside, i.e. base + sugar but lacking 5'-phosphate
  modified_base 2, 5, 8, 13: /mod_base = "2'-O-methyl corresponding base"
  modified_base 21: /mod_base = "5'-thio thymidine"
  modified_base 1, 3, 4, 6, 7, 9, 10, 11, 12, 14, 15, 16, 17, 18, 19: /mod_base = "2'-hydroxy corresponding base"
ucauuaacagcucaggcugtt

SEQ ID NO: 467 - DNA, 21 bp, artificial sequence
  siRNA cross-reactive to human and rhesus monkey Eg5
  5'-terminal nucleic acid is a nucleoside, i.e. base + sugar but lacking 5'-phosphate
  modified_base 10, 13, 14, 15, 16: /mod_base = "2'-O-methyl corresponding base"
  modified_base 21: /mod_base = "5'-thio thymidine"
  modified_base 1, 2, 3, 4, 5, 6, 7, 8, 9, 11, 12, 17, 18, 19: /mod_base = "2'-hydroxy corresponding base"
aagaagagacaauuccggatt

SEQ ID NO: 468 - DNA, 21 bp, artificial sequence
  siRNA cross-reactive to human and rhesus monkey Eg5
  5'-terminal nucleic acid is a nucleoside, i.e. base + sugar but lacking 5'-phosphate
  modified_base 21: /mod_base = "5'-thio thymidine"
  modified_base 1..19: /mod_base = "2'-hydroxy corresponding base"
uccggaauugucucuucuutt

SEQ ID NO: 469 - DNA, 21 bp, artificial sequence
  siRNA cross-reactive to human and rhesus monkey Eg5
  5'-terminal nucleic acid is a nucleoside, i.e. base + sugar but lacking 5'-phosphate
  modified_base 1, 3, 4, 7, 9, 13, 14, 16, 17, 18: /mod_base = "2'-O-methyl corresponding base"
  modified_base 21: /mod_base = "5'-thio thymidine"
  modified_base 2, 5, 6, 8, 10, 11, 12, 15, 19: /mod_base = "2'-hydroxy corresponding base"
ugcugguguggauuguucatt

SEQ ID NO: 470 - DNA, 21 bp, artificial sequence
  siRNA cross-reactive to human and rhesus monkey Eg5
  5'-terminal nucleic acid is a nucleoside, i.e. base + sugar but lacking 5'-phosphate
  modified_base 5, 10, 12, 15, 18: /mod_base = "2'-O-methyl corresponding base"
  modified_base 21: /mod_base = "5'-thio thymidine"
  modified_base 1, 2, 3, 4, 6, 7, 8, 9, 11, 13, 14, 16, 17, 19: /mod_base = "2'-hydroxy corresponding base"
ugaacaauccacaccagcatt

SEQ ID NO: 471 - DNA, 21 bp, artificial sequence
  siRNA cross-reactive to human and rhesus monkey Eg5
  5'-terminal nucleic acid is a nucleoside, i.e. base + sugar but lacking 5'-phosphate
  modified_base 4, 5, 6, 8, 9, 10, 12: /mod_base = "2'-O-methyl corresponding base"
  modified_base 21: /mod_base = "5'-thio thymidine"
  modified_base 1, 2, 3, 7, 11, 13, 14, 15, 16, 17, 18, 19: /mod_base = "2'-hydroxy corresponding base"
aaauucgucugcgaagaagtt

SEQ ID NO: 472 - DNA, 21 bp, artificial sequence
  siRNA cross-reactive to human and rhesus monkey Eg5
  5'-terminal nucleic acid is a nucleoside, i.e. base + sugar but lacking 5'-phosphate
  modified_base 9: /mod_base = "2'-O-methyl corresponding base"
  modified_base 21: /mod_base = "5'-thio thymidine"
  modified_base 1, 2, 3, 4, 5, 6, 7, 8, 10, 11, 12, 13, 14, 15, 16, 17, 18, 19: /mod_base = "2'-hydroxy corresponding base"
cuucuucgcagacgaauuutt

SEQ ID NO: 473 - DNA, 21 bp, artificial sequence
  siRNA cross-reactive to human and rhesus monkey Eg5
  5'-terminal nucleic acid is a nucleoside, i.e. base + sugar but lacking 5'-phosphate
  modified_base 1, 2, 3, 4, 5, 11, 12, 17, 19: /mod_base = "2'-O-methyl corresponding base"
  modified_base 21: /mod_base = "5'-thio thymidine"
  modified_base 6, 7, 8, 9, 10, 13, 14, 15, 16, 18: /mod_base = "2'-hydroxy corresponding base"
uuucuggaaguugagaugutt

SEQ ID NO: 474 - DNA, 21 bp, artificial sequence
  siRNA cross-reactive to human and rhesus monkey Eg5
  5'-terminal nucleic acid is a nucleoside, i.e. base + sugar but lacking 5'-phosphate
  modified_base 2, 7, 14: /mod_base = "2'-O-methyl corresponding base"
  modified_base 21: /mod_base = "5'-thio thymidine"
  modified_base 1, 3, 4, 5, 6, 8, 9, 10, 11, 12, 13, 15, 16, 17, 18, 19: /mod_base = "2'-hydroxy corresponding base"
acaucucaacuuccagaaatt

SEQ ID NO: 475 - DNA, 21 bp, artificial sequence
  siRNA cross-reactive to human and rhesus monkey Eg5
  5'-terminal nucleic acid is a nucleoside, i.e. base + sugar but lacking 5'-phosphate
  modified_base 1, 3, 4, 8, 12, 13, 16, 18, 19: /mod_base = "2'-O-methyl corresponding base"
  modified_base 21: /mod_base = "5'-thio thymidine"
  modified_base 2, 5, 6, 7, 9, 10, 11, 14, 15, 17: /mod_base = "2'-hydroxy corresponding base"
uacuaaacagauugauguutt

SEQ ID NO: 476 - DNA, 21 bp, artificial sequence
  siRNA cross-reactive to human and rhesus monkey Eg5
  5'-terminal nucleic acid is a nucleoside, i.e. base + sugar but lacking 5'-phosphate
  modified_base 3, 6, 15, 18: /mod_base = "2'-O-methyl corresponding base"
  modified_base 21: /mod_base = "5'-thio thymidine"
  modified_base 1, 2, 4, 5, 7, 8, 9, 10, 11, 12, 13, 14, 16, 17, 19: /mod_base = "2'-hydroxy corresponding base"
aacaucaaucuguuuaguatt

SEQ ID NO: 477 - DNA, 21 bp, artificial sequence
  siRNA cross-reactive to human and rhesus monkey Eg5
  5'-terminal nucleic acid is a nucleoside, i.e. base + sugar but lacking 5'-phosphate
  modified_base 3, 4, 7, 9, 10, 11, 13, 14, 19: /mod_base = "2'-O-methyl corresponding base"
  modified_base 21: /mod_base = "5'-thio thymidine"
  modified_base 1, 2, 5, 6, 8, 12, 15, 16, 17, 18: /mod_base = "2'-hydroxy corresponding base"
gauugauguuuaccgaagutt

SEQ ID NO: 478 - DNA, 21 bp, artificial sequence
  siRNA cross-reactive to human and rhesus monkey Eg5
  5'-terminal nucleic acid is a nucleoside, i.e. base + sugar but lacking 5'-phosphate
  modified_base 8, 12, 15: /mod_base = "2'-O-methyl corresponding base"
  modified_base 21: /mod_base = "5'-thio thymidine"
  modified_base 1, 2, 3, 4, 5, 6, 7, 9, 10, 11, 13, 14, 16, 17, 18, 19: /mod_base = "2'-hydroxy corresponding base"
acuucgguaaacaucaauctt

SEQ ID NO: 479 - DNA, 21 bp, artificial sequence
  siRNA cross-reactive to human and rhesus monkey Eg5
  5'-terminal nucleic acid is a nucleoside, i.e. base + sugar but lacking 5'-phosphate
  modified_base 2, 4, 5, 7, 8, 9, 10, 11, 13, 15, 17: /mod_base = "2'-O-methyl corresponding base"
  modified_base 21: /mod_base = "5'-thio thymidine"
  modified_base 1, 3, 6, 12, 14, 16, 18, 19: /mod_base = "2'-hydroxy corresponding base"
gcacuaucuuugcguauggtt

SEQ ID NO: 480 - DNA, 21 bp, artificial sequence
  siRNA cross-reactive to human and rhesus monkey Eg5
  5'-terminal nucleic acid is a nucleoside, i.e. base + sugar but lacking 5'-phosphate
  modified_base 2, 4, 8, 14: /mod_base = "2'-O-methyl corresponding base"
  modified_base 21: /mod_base = "5'-thio thymidine"
  modified_base 1, 3, 5, 6, 7, 9, 10, 11, 12, 13, 15, 16, 17, 18, 19: /mod_base = "2'-hydroxy corresponding base"
ccauacgcaaagauagugctt

SEQ ID NO: 481 - DNA, 21 bp, artificial sequence
  siRNA cross-reactive to human and rhesus monkey Eg5
  5'-terminal nucleic acid is a nucleoside, i.e. base + sugar but lacking 5'-phosphate
  modified_base 1, 4, 6, 9, 10, 11, 12, 14, 16, 18, 19: /mod_base = "2'-O-methyl corresponding base"
  modified_base 21: /mod_base = "5'-thio thymidine"
  modified_base 2, 3, 5, 7, 8, 13, 15, 17: /mod_base = "2'-hydroxy corresponding base"
ugguauaauuccacguacctt

SEQ ID NO: 482 - DNA, 21 bp, artificial sequence
  siRNA cross-reactive to human and rhesus monkey Eg5
  5'-terminal nucleic acid is a nucleoside, i.e. base + sugar but lacking 5'-phosphate
  modified_base 3, 13, 15, 18: /mod_base = "2'-O-methyl corresponding base"
  modified_base 21: /mod_base = "5'-thio thymidine"
  modified_base 1, 2, 4, 5, 6, 7, 8, 9, 10, 11, 12, 14, 16, 17, 19: /mod_base = "2'-hydroxy corresponding base"
gguacguggaauuauaccatt

SEQ ID NO: 483 - DNA, 21 bp, artificial sequence
  siRNA cross-reactive to human and rhesus monkey Eg5
  5'-terminal nucleic acid is a nucleoside, i.e. base + sugar but lacking 5'-phosphate
  modified_base 3, 7, 8, 10, 11, 12, 15, 17: /mod_base = "2'-O-methyl corresponding base"
  modified_base 21: /mod_base = "5'-thio thymidine"
  modified_base 1, 2, 4, 5, 6, 9, 13, 14, 16, 18, 19: /mod_base = "2'-hydroxy corresponding base"
agcaagcugcuuaacacagtt

SEQ ID NO: 484 - DNA, 21 bp, artificial sequence
  siRNA cross-reactive to human and rhesus monkey Eg5
  5'-terminal nucleic acid is a nucleoside, i.e. base + sugar but lacking 5'-phosphate
  modified_base 7, 11: /mod_base = "2'-O-methyl corresponding base"
  modified_base 21: /mod_base = "5'-thio thymidine"
  modified_base 1, 2, 3, 4, 5, 6, 8, 9, 10, 12, 13, 14, 15, 16, 17, 18, 19: /mod_base = "2'-hydroxy corresponding base"
cuguguuaagcagcuugcutt

SEQ ID NO: 485 - DNA, 21 bp, artificial sequence
  siRNA cross-reactive to human and rhesus monkey Eg5
  5'-terminal nucleic acid is a nucleoside, i.e. base + sugar but lacking 5'-phosphate
  modified_base 1, 7, 8, 10, 11, 12, 15, 18: /mod_base = "2'-O-methyl corresponding base"
  modified_base 21: /mod_base = "5'-thio thymidine"
  modified_base 2, 3, 4, 5, 6, 9, 13, 14, 16, 17, 19: /mod_base = "2'-hydroxy corresponding base"
cagaaaccacuuaguagugtt

SEQ ID NO: 486 - DNA, 21 bp, artificial sequence
  siRNA cross-reactive to human and rhesus monkey Eg5
  5'-terminal nucleic acid is a nucleoside, i.e. base + sugar but lacking 5'-phosphate
  modified_base 1, 4, 7: /mod_base = "2'-O-methyl corresponding base"
  modified_base 21: /mod_base = "5'-thio thymidine"
  modified_base 2, 3, 5, 6, 8, 9, 10, 11, 12, 13, 14, 15, 16, 17, 18, 19: /mod_base = "2'-hydroxy corresponding base"
cacuacuaagugguuucugtt

SEQ ID NO: 487 - DNA, 21 bp, artificial sequence
  siRNA cross-reactive to human and rhesus monkey Eg5
  5'-terminal nucleic acid is a nucleoside, i.e. base + sugar but lacking 5'-phosphate
  modified_base 3, 4, 5, 7, 8, 14, 15, 17: /mod_base = "2'-O-methyl corresponding base"
  modified_base 21: /mod_base = "5'-thio thymidine"
  modified_base 1, 2, 6, 9, 10, 11, 12, 13, 16, 18, 19: /mod_base = "2'-hydroxy corresponding base"
aacuuauuggagguuguaatt

SEQ ID NO: 488 - DNA, 21 bp, artificial sequence
  siRNA cross-reactive to human and rhesus monkey Eg5
  5'-terminal nucleic acid is a nucleoside, i.e. base + sugar but lacking 5'-phosphate
  modified_base 2, 4, 11, 14: /mod_base = "2'-O-methyl corresponding base"
  modified_base 21: /mod_base = "5'-thio thymidine"
  modified_base 1, 3, 5, 6, 7, 8, 9, 10, 12, 13, 15, 16, 17, 18, 19: /mod_base = "2'-hydroxy corresponding base"
uuacaaccuccaauaaguutt

SEQ ID NO: 489 - DNA, 21 bp, artificial sequence
  siRNA cross-reactive to human and rhesus monkey Eg5
  5'-terminal nucleic acid is a nucleoside, i.e. base + sugar but lacking 5'-phosphate
  modified_base 1, 2, 10, 11, 12, 17: /mod_base = "2'-O-methyl corresponding base"
  modified_base 21: /mod_base = "5'-thio thymidine"
  modified_base 3, 4, 5, 6, 7, 8, 9, 13, 14, 15, 16, 18, 19: /mod_base = "2'-hydroxy corresponding base"
cuggagaggucuaaaguggtt

SEQ ID NO: 490 - DNA, 21 bp, artificial sequence
  siRNA cross-reactive to human and rhesus monkey Eg5
  5'-terminal nucleic acid is a nucleoside, i.e. base + sugar but lacking 5'-phosphate
  modified_base 2, 7, 17: /mod_base = "2'-O-methyl corresponding base"
  modified_base 21: /mod_base = "5'-thio thymidine"
  modified_base 1, 3, 4, 5, 6, 8, 9, 10, 11, 12, 13, 14, 15, 16, 18, 19: /mod_base = "2'-hydroxy corresponding base"
ccacuuuagaccucuccagtt

SEQ ID NO: 491 - DNA, 21 bp, artificial sequence
  siRNA cross-reactive to human and rhesus monkey Eg5
  5'-terminal nucleic acid is a nucleoside, i.e. base + sugar but lacking 5'-phosphate
  modified_base 9, 11, 16, 19: /mod_base = "2'-O-methyl corresponding base"
  modified_base 21: /mod_base = "5'-thio thymidine"
  modified_base 1, 2, 3, 4, 5, 6, 7, 8, 10, 12, 13, 14, 15, 17, 18: /mod_base = "2'-hydroxy corresponding base"
aaaaaagauauaaggcagutt

SEQ ID NO: 492 - DNA, 21 bp, artificial sequence
  siRNA cross-reactive to human and rhesus monkey Eg5
  5'-terminal nucleic acid is a nucleoside, i.e. base + sugar but lacking 5'-phosphate
  modified_base 8, 10: /mod_base = "2'-O-methyl corresponding base"
  modified_base 21: /mod_base = "5'-thio thymidine"
  modified_base 1, 2, 3, 4, 5, 6, 7, 9, 11, 12, 13, 14, 15, 16, 17, 18, 19: /mod_base = "2'-hydroxy corresponding base"
acugccuuauaucuuuuuutt

SEQ ID NO: 493 - DNA, 21 bp, artificial sequence
  siRNA cross-reactive to human and rhesus monkey Eg5
  5'-terminal nucleic acid is a nucleoside, i.e. base + sugar but lacking 5'-phosphate
  modified_base 4, 5, 6, 7, 10, 12, 13, 14, 16, 17, 18: /mod_base = "2'-O-methyl corresponding base"
  modified_base 21: /mod_base = "5'-thio thymidine"
  modified_base 1, 2, 3, 8, 9, 11, 15, 19: /mod_base = "2'-hydroxy corresponding base"
gaauuuugauaucuacccatt

SEQ ID NO: 494 - DNA, 21 bp, artificial sequence
  siRNA cross-reactive to human and rhesus monkey Eg5
  5'-terminal nucleic acid is a nucleoside, i.e. base + sugar but lacking 5'-phosphate
  modified_base 5, 9, 12: /mod_base = "2'-O-methyl corresponding base"
  modified_base 21: /mod_base = "5'-thio thymidine"
  modified_base 1, 2, 3, 4, 6, 7, 8, 10, 11, 13, 14, 15, 16, 17, 18, 19: /mod_base = "2'-hydroxy corresponding base"
uggguagauaucaaaauuctt

SEQ ID NO: 495 - DNA, 21 bp, artificial sequence
  siRNA cross-reactive to human and rhesus monkey Eg5
  5'-terminal nucleic acid is a nucleoside, i.e. base + sugar but lacking 5'-phosphate
  modified_base 2, 4, 5, 6, 7, 8, 11, 12, 13, 16, 19: /mod_base = "2'-O-methyl corresponding base"
  modified_base 21: /mod_base = "5'-thio thymidine"
  modified_base 1, 3, 9, 10, 14, 15, 17, 18: /mod_base = "2'-hydroxy corresponding base"
guauuuuugaucuggcaactt

SEQ ID NO: 496 - DNA, 21 bp, artificial sequence
  siRNA cross-reactive to human and rhesus monkey Eg5
  5'-terminal nucleic acid is a nucleoside, i.e. base + sugar but lacking 5'-phosphate
  modified_base 6, 11, 17: /mod_base = "2'-O-methyl corresponding base"
  modified_base 21: /mod_base = "5'-thio thymidine"
  modified_base 1, 2, 3, 4, 5, 7, 8, 9, 10, 12, 13, 14, 15, 16, 18, 19: /mod_base = "2'-hydroxy corresponding base"
guugccagaucaaaaauactt

SEQ ID NO: 497 - DNA, 21 bp, artificial sequence
  siRNA cross-reactive to human and rhesus monkey Eg5
  5'-terminal nucleic acid is a nucleoside, i.e. base + sugar but lacking 5'-phosphate
  modified_base 5, 6, 7, 8, 9, 10, 13, 14, 17, 19: /mod_base = "2'-O-methyl corresponding base"
  modified_base 21: /mod_base = "5'-thio thymidine"
  modified_base 1, 2, 3, 4, 11, 12, 15, 16, 18: /mod_base = "2'-hydroxy corresponding base"
aggaucccuuggcugguautt

SEQ ID NO: 498 - DNA, 21 bp, artificial sequence
  siRNA cross-reactive to human and rhesus monkey Eg5
  5'-terminal nucleic acid is a nucleoside, i.e. base + sugar but lacking 5'-phosphate
  modified_base 2, 5, 9: /mod_base = "2'-O-methyl corresponding base"
  modified_base 21: /mod_base = "5'-thio thymidine"
  modified_base 1, 3, 4, 6, 7, 8, 10, 11, 12, 13, 14, 15, 16, 17, 18, 19: /mod_base = "2'-hydroxy corresponding base"
auaccagccaagggauccutt

SEQ ID NO: 499 - DNA, 21 bp, artificial sequence
  siRNA cross-reactive to human and rhesus monkey Eg5
  5'-terminal nucleic acid is a nucleoside, i.e. base + sugar but lacking 5'-phosphate
  modified_base 4, 5, 6, 7, 8, 9, 12, 13, 16, 18: /mod_base = "2'-O-methyl corresponding base"
  modified_base 21: /mod_base = "5'-thio thymidine"
  modified_base 1, 2, 3, 10, 11, 14, 15, 17, 19: /mod_base = "2'-hydroxy corresponding base"
ggaucccuuggcugguauatt

SEQ ID NO: 500 - DNA, 21 bp, artificial sequence
  siRNA cross-reactive to human and rhesus monkey Eg5
  5'-terminal nucleic acid is a nucleoside, i.e. base + sugar but lacking 5'-phosphate
  modified_base 1, 3, 6, 10: /mod_base = "2'-O-methyl corresponding base"
  modified_base 21: /mod_base = "5'-thio thymidine"
  modified_base 2, 4, 5, 7, 8, 9, 11, 12, 13, 14, 15, 16, 17, 18, 19: /mod_base = "2'-hydroxy corresponding base"
uauaccagccaagggaucctt

SEQ ID NO: 501 - DNA, 21 bp, artificial sequence
  siRNA cross-reactive to human and rhesus monkey Eg5
  5'-terminal nucleic acid is a nucleoside, i.e. base + sugar but lacking 5'-phosphate
  modified_base 1, 4, 7, 12, 14, 17, 18, 19: /mod_base = "2'-O-methyl corresponding base"
  modified_base 21: /mod_base = "5'-thio thymidine"
  modified_base 2, 3, 5, 6, 8, 9, 10, 11, 13, 15, 16: /mod_base = "2'-hydroxy corresponding base"
caauaguagaaugugaucctt

SEQ ID NO: 502 - DNA, 21 bp, artificial sequence
  siRNA cross-reactive to human and rhesus monkey Eg5
  5'-terminal nucleic acid is a nucleoside, i.e. base + sugar but lacking 5'-phosphate
  modified_base 5, 7, 12, 15: /mod_base = "2'-O-methyl corresponding base"
  modified_base 21: /mod_base = "5'-thio thymidine"
  modified_base 1, 2, 3, 4, 6, 8, 9, 10, 11, 13, 14, 16, 17, 18, 19: /mod_base = "2'-hydroxy corresponding base"
ggaucacauucuacuauugtt

SEQ ID NO: 503 - DNA, 21 bp, artificial sequence
  siRNA cross-reactive to human and rhesus monkey Eg5
  5'-terminal nucleic acid is a nucleoside, i.e. base + sugar but lacking 5'-phosphate
  modified_base 2, 3, 5, 8, 9, 11, 13, 14, 16, 17, 18, 19: /mod_base = "2'-O-methyl corresponding base"
  modified_base 21: /mod_base = "5'-thio thymidine"
  modified_base 1, 4, 6, 7, 10, 12, 15: /mod_base = "2'-hydroxy corresponding base"
gcuauaauugcacuaucuutt

SEQ ID NO: 504 - DNA, 21 bp, artificial sequence
  siRNA cross-reactive to human and rhesus monkey Eg5
  5'-terminal nucleic acid is a nucleoside, i.e. base + sugar but lacking 5'-phosphate
  modified_base 5, 10, 14, 16: /mod_base = "2'-O-methyl corresponding base"
  modified_base 21: /mod_base = "5'-thio thymidine"
  modified_base 1, 2, 3, 4, 6, 7, 8, 9, 11, 12, 13, 15, 17, 18, 19: /mod_base = "2'-hydroxy corresponding base"
aagauagugcaauuauagctt

SEQ ID NO: 505 - DNA, 21 bp, artificial sequence
  siRNA cross-reactive to human and rhesus monkey Eg5
  5'-terminal nucleic acid is a nucleoside, i.e. base + sugar but lacking 5'-phosphate
  modified_base 1, 3, 4, 5, 6, 7, 8, 10, 11, 15, 16, 17, 18, 19: /mod_base = "2'-O-methyl corresponding base"
  modified_base 21: /mod_base = "5'-thio thymidine"
  modified_base 2, 9, 12, 13, 14: /mod_base = "2'-hydroxy corresponding base"
uacccuucaucaaauuuuutt

SEQ ID NO: 506 - DNA, 21 bp, artificial sequence
  siRNA cross-reactive to human and rhesus monkey Eg5
  5'-terminal nucleic acid is a nucleoside, i.e. base + sugar but lacking 5'-phosphate
  modified_base 18: /mod_base = "2'-O-methyl corresponding base"
  modified_base 21: /mod_base = "5'-thio thymidine"
  modified_base 1, 2, 3, 4, 5, 6, 7, 8, 9, 10, 11, 12, 13, 14, 15, 16, 17, 19: /mod_base = "2'-hydroxy corresponding base"
aaaaauuugaugaaggguatt

SEQ ID NO: 507 - DNA, 21 bp, artificial sequence
  siRNA cross-reactive to human and rhesus monkey Eg5
  5'-terminal nucleic acid is a nucleoside, i.e. base + sugar but lacking 5'-phosphate
  modified_base 5, 7, 9, 10, 14, 18, 19: /mod_base = "2'-O-methyl corresponding base"
  modified_base 21: /mod_base = "5'-thio thymidine"
  modified_base 1, 2, 3, 4, 6, 8, 11, 12, 13, 15, 16, 17: /mod_base = "2'-hydroxy corresponding base"
agaacauauugaauaagcctt

SEQ ID NO: 508 - DNA, 21 bp, artificial sequence
  siRNA cross-reactive to human and rhesus monkey Eg5
  5'-terminal nucleic acid is a nucleoside, i.e. base + sugar but lacking 5'-phosphate
  modified_base 5, 9, 12: /mod_base = "2'-O-methyl corresponding base"
  modified_base 21: /mod_base = "5'-thio thymidine"
  modified_base 1, 2, 3, 4, 6, 7, 8, 10, 11, 13, 14, 15, 16, 17, 18, 19: /mod_base = "2'-hydroxy corresponding base"
ggcuuauucaauauguucutt

SEQ ID NO: 509 - DNA, 21 bp, artificial sequence
  siRNA cross-reactive to human and rhesus monkey Eg5
  5'-terminal nucleic acid is a nucleoside, i.e. base + sugar but lacking 5'-phosphate
  modified_base 4, 5, 8, 10, 11, 13, 14: /mod_base = "2'-O-methyl corresponding base"
  modified_base 21: /mod_base = "5'-thio thymidine"
  modified_base 1, 2, 3, 6, 7, 9, 12, 15, 16, 17, 18, 19: /mod_base = "2'-hydroxy corresponding base"
aaauuggugcuguugaggatt

SEQ ID NO: 510 - DNA, 21 bp, artificial sequence
  siRNA cross-reactive to human and rhesus monkey Eg5
  5'-terminal nucleic acid is a nucleoside, i.e. base + sugar but lacking 5'-phosphate
  modified_base 5, 8, 11, 14: /mod_base = "2'-O-methyl corresponding base"
  modified_base 21: /mod_base = "5'-thio thymidine"
  modified_base 1, 2, 3, 4, 6, 7, 9, 10, 12, 13, 15, 16, 17, 18, 19: /mod_base = "2'-hydroxy corresponding base"
uccucaacagcaccaauuutt

SEQ ID NO: 511 - DNA, 21 bp, artificial sequence
  siRNA cross-reactive to human and rhesus monkey Eg5
  5'-terminal nucleic acid is a nucleoside, i.e. base + sugar but lacking 5'-phosphate
  modified_base 1, 5, 10, 11, 13, 18, 19: /mod_base = "2'-O-methyl corresponding base"
  modified_base 21: /mod_base = "5'-thio thymidine"
  modified_base 2, 3, 4, 6, 7, 8, 9, 12, 14, 15, 16, 17: /mod_base = "2'-hydroxy corresponding base"
ugaauaggguuacagaguutt

SEQ ID NO: 512 - DNA, 21 bp, artificial sequence
  siRNA cross-reactive to human and rhesus monkey Eg5
  5'-terminal nucleic acid is a nucleoside, i.e. base + sugar but lacking 5'-phosphate
  modified_base 8, 14, 18: /mod_base = "2'-O-methyl corresponding base"
  modified_base 21: /mod_base = "5'-thio thymidine"
  modified_base 1, 2, 3, 4, 5, 6, 7, 9, 10, 11, 12, 13, 15, 16, 17, 19: /mod_base = "2'-hydroxy corresponding base"
aacucuguaacccuauucatt

SEQ ID NO: 513 - DNA, 21 bp, artificial sequence
  siRNA cross-reactive to human and rhesus monkey Eg5
  5'-terminal nucleic acid is a nucleoside, i.e. base + sugar but lacking 5'-phosphate
  modified_base 6, 7, 8, 13, 14, 16, 17, 18: /mod_base = "2'-O-methyl corresponding base"
  modified_base 21: /mod_base = "5'-thio thymidine"
  modified_base 1, 2, 3, 4, 5, 9, 10, 11, 12, 15, 19: /mod_base = "2'-hydroxy corresponding base"
aagaacuugaaaccacucatt

SEQ ID NO: 514 - DNA, 21 bp, artificial sequence
  siRNA cross-reactive to human and rhesus monkey Eg5
  5'-terminal nucleic acid is a nucleoside, i.e. base + sugar but lacking 5'-phosphate
  modified_base 11: /mod_base = "2'-O-methyl corresponding base"
  modified_base 21: /mod_base = "5'-thio thymidine"
  modified_base 1, 2, 3, 4, 5, 6, 7, 8, 9, 10, 12, 13, 14, 15, 16, 17, 18, 19: /mod_base = "2'-hydroxy corresponding base"
ugagugguuucaaguucuutt

SEQ ID NO: 515 - DNA, 21 bp, artificial sequence
  siRNA cross-reactive to human and rhesus monkey Eg5
  5'-terminal nucleic acid is a nucleoside, i.e. base + sugar but lacking 5'-phosphate
  modified_base 3, 8, 12, 13, 14, 16, 17, 18, 19: /mod_base = "2'-O-methyl corresponding base"
  modified_base 21: /mod_base = "5'-thio thymidine"
  modified_base 1, 2, 4, 5, 6, 7, 9, 10, 11, 15: /mod_base = "2'-hydroxy corresponding base"
aauaaagcagacccauucctt

SEQ ID NO: 516 - DNA, 21 bp, artificial sequence
  siRNA cross-reactive to human and rhesus monkey Eg5
  5'-terminal nucleic acid is a nucleoside, i.e. base + sugar but lacking 5'-phosphate
  modified_base 16: /mod_base = "2'-O-methyl corresponding base"
  modified_base 21: /mod_base = "5'-thio thymidine"
  modified_base 1, 2, 3, 4, 5, 6, 7, 8, 9, 10, 11, 12, 13, 14, 15, 17, 18, 19: /mod_base = "2'-hydroxy corresponding base"
ggaaugggucugcuuuauutt

SEQ ID NO: 517 - DNA, 21 bp, artificial sequence
  siRNA cross-reactive to human and rhesus monkey Eg5
  5'-terminal nucleic acid is a nucleoside, i.e. base + sugar but lacking 5'-phosphate
  modified_base 2, 4, 5, 6, 8, 9, 12, 14, 15, 18: /mod_base = "2'-O-methyl corresponding base"
  modified_base 21: /mod_base = "5'-thio thymidine"
  modified_base 1, 3, 7, 10, 11, 13, 16, 17, 19: /mod_base = "2'-hydroxy corresponding base"
auacccaucaacacugguatt

SEQ ID NO: 518 - DNA, 21 bp, artificial sequence
  siRNA cross-reactive to human and rhesus monkey Eg5
  5'-terminal nucleic acid is a nucleoside, i.e. base + sugar but lacking 5'-phosphate
  modified_base 1, 4, 17: /mod_base = "2'-O-methyl corresponding base"
  modified_base 21: /mod_base = "5'-thio thymidine"
  modified_base 2, 3, 5, 6, 7, 8, 9, 10, 11, 12, 13, 14, 15, 16, 18, 19: /mod_base = "2'-hydroxy corresponding base"
uaccaguguugauggguautt

SEQ ID NO: 519 - DNA, 21 bp, artificial sequence
  siRNA cross-reactive to human and rhesus monkey Eg5
  5'-terminal nucleic acid is a nucleoside, i.e. base + sugar but lacking 5'-phosphate
  modified_base 1, 5, 6, 8, 9, 10, 12, 13, 16, 17: /mod_base = "2'-O-methyl corresponding base"
  modified_base 21: /mod_base = "5'-thio thymidine"
  modified_base 2, 3, 4, 7, 11, 14, 15, 18, 19: /mod_base = "2'-hydroxy corresponding base"
uggauuguucaucaauuggtt

SEQ ID NO: 520 - DNA, 21 bp, artificial sequence
  siRNA cross-reactive to human and rhesus monkey Eg5
  5'-terminal nucleic acid is a nucleoside, i.e. base + sugar but lacking 5'-phosphate
  modified_base 2, 13, 18: /mod_base = "2'-O-methyl corresponding base"
  modified_base 21: /mod_base = "5'-thio thymidine"
  modified_base 1, 3, 4, 5, 6, 7, 8, 9, 10, 11, 12, 14, 15, 16, 17, 19: /mod_base = "2'-hydroxy corresponding base"
ccaauugaugaacaauccatt

SEQ ID NO: 521 - DNA, 21 bp, artificial sequence
  siRNA cross-reactive to human and rhesus monkey Eg5
  5'-terminal nucleic acid is a nucleoside, i.e. base + sugar but lacking 5'-phosphate
  modified_base 1, 9, 10, 11, 16: /mod_base = "2'-O-methyl corresponding base"
  modified_base 21: /mod_base = "5'-thio thymidine"
  modified_base 2, 3, 4, 5, 6, 7, 8, 12, 13, 14, 15, 17, 18, 19: /mod_base = "2'-hydroxy corresponding base"
uggagaggucuaaaguggatt

SEQ ID NO: 522 - DNA, 21 bp, artificial sequence
  siRNA cross-reactive to human and rhesus monkey Eg5
  5'-terminal nucleic acid is a nucleoside, i.e. base + sugar but lacking 5'-phosphate
  modified_base 3, 8, 18: /mod_base = "2'-O-methyl corresponding base"
  modified_base 21: /mod_base = "5'-thio thymidine"
  modified_base 1, 2, 4, 5, 6, 7, 9, 10, 11, 12, 13, 14, 15, 16, 17, 19: /mod_base = "2'-hydroxy corresponding base"
uccacuuuagaccucuccatt

SEQ ID NO: 523 - DNA, 21 bp, artificial sequence
  siRNA cross-reactive to human and rhesus monkey Eg5
  5'-terminal nucleic acid is a nucleoside, i.e. base + sugar but lacking 5'-phosphate
  modified_base 2, 3, 5, 6, 7, 8, 9, 11, 14, 15, 16, 18, 19: /mod_base = "2'-O-methyl corresponding base"
  modified_base 21: /mod_base = "5'-thio thymidine"
  modified_base 1, 4, 10, 12, 13, 17: /mod_base = "2'-hydroxy corresponding base"
gucaucccuauaguucacutt

SEQ ID NO: 524 - DNA, 21 bp, artificial sequence
  siRNA cross-reactive to human and rhesus monkey Eg5
  5'-terminal nucleic acid is a nucleoside, i.e. base + sugar but lacking 5'-phosphate
  modified_base 8, 10: /mod_base = "2'-O-methyl corresponding base"
  modified_base 21: /mod_base = "5'-thio thymidine"
  modified_base 1, 2, 3, 4, 5, 6, 7, 9, 11, 12, 13, 14, 15, 16, 17, 18, 19: /mod_base = "2'-hydroxy corresponding base"
agugaacuauagggaugactt

SEQ ID NO: 525 - DNA, 21 bp, artificial sequence
  siRNA cross-reactive to human and rhesus monkey Eg5
  5'-terminal nucleic acid is a nucleoside, i.e. base + sugar but lacking 5'-phosphate
  modified_base 2, 5, 8, 9, 11, 14, 15, 16, 17, 18, 19: /mod_base = "2'-O-methyl corresponding base"
  modified_base 21: /mod_base = "5'-thio thymidine"
  modified_base 1, 3, 4, 6, 7, 10, 12, 13: /mod_base = "2'-hydroxy corresponding base"
auaauggcuauaauuucuctt

SEQ ID NO: 526 - DNA, 21 bp, artificial sequence
  siRNA cross-reactive to human and rhesus monkey Eg5
  5'-terminal nucleic acid is a nucleoside, i.e. base + sugar but lacking 5'-phosphate
  modified_base 8, 10, 14, 17: /mod_base = "2'-O-methyl corresponding base"
  modified_base 21: /mod_base = "5'-thio thymidine"
  modified_base 1, 2, 3, 4, 5, 6, 7, 9, 11, 12, 13, 15, 16, 18, 19: /mod_base = "2'-hydroxy corresponding base"
gagaaauuauagccauuautt

SEQ ID NO: 527 - DNA, 21 bp, artificial sequence
  siRNA cross-reactive to human and rhesus monkey Eg5
  5'-terminal nucleic acid is a nucleoside, i.e. base + sugar but lacking 5'-phosphate
  modified_base 2, 3, 4, 5, 6, 7, 10, 11, 14, 16, 19: /mod_base = "2'-O-methyl corresponding base"
  modified_base 21: /mod_base = "5'-thio thymidine"
  modified_base 1, 8, 9, 12, 13, 15, 17, 18: /mod_base = "2'-hydroxy corresponding base"
aucccuuggcugguauaautt

SEQ ID NO: 528 - DNA, 21 bp, artificial sequence
  siRNA cross-reactive to human and rhesus monkey Eg5
  5'-terminal nucleic acid is a nucleoside, i.e. base + sugar but lacking 5'-phosphate
  modified_base 3, 5, 8, 12: /mod_base = "2'-O-methyl corresponding base"
  modified_base 21: /mod_base = "5'-thio thymidine"
  modified_base 1, 2, 4, 6, 7, 9, 10, 11, 13, 14, 15, 16, 17, 18, 19: /mod_base = "2'-hydroxy corresponding base"
auuauaccagccaagggautt

SEQ ID NO: 529 - DNA, 21 bp, artificial sequence
  siRNA cross-reactive to human and rhesus monkey Eg5
  5'-terminal nucleic acid is a nucleoside, i.e. base + sugar but lacking 5'-phosphate
  modified_base 4, 5, 7, 10, 11, 13, 15, 16, 18, 19: /mod_base = "2'-O-methyl corresponding base"
  modified_base 21: /mod_base = "5'-thio thymidine"
  modified_base 1, 2, 3, 6, 8, 9, 12, 14, 17: /mod_base = "2'-hydroxy corresponding base"
gggcuauaauugcacuauctt

SEQ ID NO: 530 - DNA, 21 bp, artificial sequence
  siRNA cross-reactive to human and rhesus monkey Eg5
  5'-terminal nucleic acid is a nucleoside, i.e. base + sugar but lacking 5'-phosphate
  modified_base 3, 8, 12, 14: /mod_base = "2'-O-methyl corresponding base"
  modified_base 21: /mod_base = "5'-thio thymidine"
  modified_base 1, 2, 4, 5, 6, 7, 9, 10, 11, 13, 15, 16, 17, 18, 19: /mod_base = "2'-hydroxy corresponding base"
gauagugcaauuauagccctt

SEQ ID NO: 531 - DNA, 21 bp, artificial sequence
  siRNA cross-reactive to human and rhesus monkey Eg5
  5'-terminal nucleic acid is a nucleoside, i.e. base + sugar but lacking 5'-phosphate
  modified_base 3, 4, 5, 6, 7, 8, 9, 16, 18: /mod_base = "2'-O-methyl corresponding base"
  modified_base 21: /mod_base = "5'-thio thymidine"
  modified_base 1, 2, 10, 11, 12, 13, 14, 15, 17, 19: /mod_base = "2'-hydroxy corresponding base"
gauucucuuggagggcguatt

SEQ ID NO: 532 - DNA, 21 bp, artificial sequence
  siRNA cross-reactive to human and rhesus monkey Eg5
  5'-terminal nucleic acid is a nucleoside, i.e. base + sugar but lacking 5'-phosphate
  modified_base 1, 10: /mod_base = "2'-O-methyl corresponding base"
  modified_base 21: /mod_base = "5'-thio thymidine"
  modified_base 2, 3, 4, 5, 6, 7, 8, 9, 11, 12, 13, 14, 15, 16, 17, 18, 19: /mod_base = "2'-hydroxy corresponding base"
uacgcccuccaagagaauctt

SEQ ID NO: 533 - DNA, 21 bp, artificial sequence
  siRNA cross-reactive to human and rhesus monkey Eg5
  5'-terminal nucleic acid is a nucleoside, i.e. base + sugar but lacking 5'-phosphate
  modified_base 2, 4, 5, 6, 7, 8, 9, 12, 13, 14, 15: /mod_base = "2'-O-methyl corresponding base"
  modified_base 21: /mod_base = "5'-thio thymidine"
  modified_base 1, 3, 10, 11, 16, 17, 18, 19: /mod_base = "2'-hydroxy corresponding base"
gcaucucucaaucuugaggtt

SEQ ID NO: 534 - DNA, 21 bp, artificial sequence
  siRNA cross-reactive to human and rhesus monkey Eg5
  5'-terminal nucleic acid is a nucleoside, i.e. base + sugar but lacking 5'-phosphate
  modified_base 4: /mod_base = "2'-O-methyl corresponding base"
  modified_base 21: /mod_base = "5'-thio thymidine"
  modified_base 1, 2, 3, 5, 6, 7, 8, 9, 10, 11, 12, 13, 14, 15, 16, 17, 18, 19: /mod_base = "2'-hydroxy corresponding base"
ccucaagauugagagaugctt

SEQ ID NO: 535 - DNA, 21 bp, artificial sequence
  siRNA cross-reactive to human and rhesus monkey Eg5
  5'-terminal nucleic acid is a nucleoside, i.e. base + sugar but lacking 5'-phosphate
  modified_base 1, 4, 10, 11, 12, 18: /mod_base = "2'-O-methyl corresponding base"
  modified_base 21: /mod_base = "5'-thio thymidine"
  modified_base 2, 3, 5, 6, 7, 8, 9, 13, 14, 15, 16, 17, 19: /mod_base = "2'-hydroxy corresponding base"
cagcagaaaucuaaggauatt

SEQ ID NO: 536 - DNA, 21 bp, artificial sequence
  siRNA cross-reactive to human and rhesus monkey Eg5
  5'-terminal nucleic acid is a nucleoside, i.e. base + sugar but lacking 5'-phosphate
  modified_base 1, 7: /mod_base = "2'-O-methyl corresponding base"
  modified_base 21: /mod_base = "5'-thio thymidine"
  modified_base 2, 3, 4, 5, 6, 8, 9, 10, 11, 12, 13, 14, 15, 16, 17, 18, 19: /mod_base = "2'-hydroxy corresponding base"
uauccuuagauuucugcugtt

SEQ ID NO: 537 - DNA, 21 bp, artificial sequence
  siRNA cross-reactive to human and rhesus monkey Eg5
  5'-terminal nucleic acid is a nucleoside, i.e. base + sugar but lacking 5'-phosphate
  modified_base 2, 3, 9, 10, 12, 13, 14, 16: /mod_base = "2'-O-methyl corresponding base"
  modified_base 21: /mod_base = "5'-thio thymidine"
  modified_base 1, 4, 5, 6, 7, 8, 11, 15, 17, 18, 19: /mod_base = "2'-hydroxy corresponding base"
gucaagagccaucuguagatt

SEQ ID NO: 538 - DNA, 21 bp, artificial sequence
  siRNA cross-reactive to human and rhesus monkey Eg5
  5'-terminal nucleic acid is a nucleoside, i.e. base + sugar but lacking 5'-phosphate
  modified_base 3, 5: /mod_base = "2'-O-methyl corresponding base"
  modified_base 21: /mod_base = "5'-thio thymidine"
  modified_base 1, 2, 4, 6, 7, 8, 9, 10, 11, 12, 13, 14, 15, 16, 17, 18, 19: /mod_base = "2'-hydroxy corresponding base"
ucuacagauggcucuugactt

SEQ ID NO: 539 - DNA, 21 bp, artificial sequence
  siRNA cross-reactive to human and rhesus monkey Eg5
  5'-terminal nucleic acid is a nucleoside, i.e. base + sugar but lacking 5'-phosphate
  modified_base 4, 10, 12, 13, 16, 18: /mod_base = "2'-O-methyl corresponding base"
  modified_base 21: /mod_base = "5'-thio thymidine"
  modified_base 1, 2, 3, 5, 6, 7, 8, 9, 11, 14, 15, 17, 19: /mod_base = "2'-hydroxy corresponding base"
aaacagaggcauuaacacatt

SEQ ID NO: 540 - DNA, 21 bp, artificial sequence
  siRNA cross-reactive to human and rhesus monkey Eg5
  5'-terminal nucleic acid is a nucleoside, i.e. base + sugar but lacking 5'-phosphate
  modified_base 6: /mod_base = "2'-O-methyl corresponding base"
  modified_base 21: /mod_base = "5'-thio thymidine"
  modified_base 1, 2, 3, 4, 5, 7, 8, 9, 10, 11, 12, 13, 14, 15, 16, 17, 18, 19: /mod_base = "2'-hydroxy corresponding base"
uguguuaaugccucuguuutt

SEQ ID NO: 541 - DNA, 21 bp, artificial sequence
  siRNA cross-reactive to human and rhesus monkey Eg5
  5'-terminal nucleic acid is a nucleoside, i.e. base + sugar but lacking 5'-phosphate
  modified_base 3, 4, 5, 9, 10, 13, 14, 15, 16, 17: /mod_base = "2'-O-methyl corresponding base"
  modified_base 21: /mod_base = "5'-thio thymidine"
  modified_base 1, 2, 6, 7, 8, 11, 12, 18, 19: /mod_base = "2'-hydroxy corresponding base"
agcccagaucaaccuuuaatt

SEQ ID NO: 542 - DNA, 21 bp, artificial sequence
  siRNA cross-reactive to human and rhesus monkey Eg5
  5'-terminal nucleic acid is a nucleoside, i.e. base + sugar but lacking 5'-phosphate
  modified_base 2: /mod_base = "2'-O-methyl corresponding base"
  modified_base 21: /mod_base = "5'-thio thymidine"
  modified_base 1, 3, 4, 5, 6, 7, 8, 9, 10, 11, 12, 13, 14, 15, 16, 17, 18, 19: /mod_base = "2'-hydroxy corresponding base"
uuaaagguugaucugggcutt

SEQ ID NO: 543 - DNA, 21 bp, artificial sequence
  siRNA cross-reactive to human and rhesus monkey Eg5
  5'-terminal nucleic acid is a nucleoside, i.e. base + sugar but lacking 5'-phosphate
  modified_base 1, 3, 4, 5, 6, 7, 10, 11, 12, 15, 18, 19: /mod_base = "2'-O-methyl corresponding base"
  modified_base 21: /mod_base = "5'-thio thymidine"
  modified_base 2, 8, 9, 13, 14, 16, 17: /mod_base = "2'-hydroxy corresponding base"
uauuuuugaucuggcaacctt

SEQ ID NO: 544 - DNA, 21 bp, artificial sequence
  siRNA cross-reactive to human and rhesus monkey Eg5
  5'-terminal nucleic acid is a nucleoside, i.e. base + sugar but lacking 5'-phosphate
  modified_base 7, 12, 18: /mod_base = "2'-O-methyl corresponding base"
  modified_base 21: /mod_base = "5'-thio thymidine"
  modified_base 1, 2, 3, 4, 5, 6, 8, 9, 10, 11, 13, 14, 15, 16, 17, 19: /mod_base = "2'-hydroxy corresponding base"
gguugccagaucaaaaauatt

SEQ ID NO: 545 - DNA, 21 bp, artificial sequence
  siRNA cross-reactive to human and rhesus monkey Eg5
  5'-terminal nucleic acid is a nucleoside, i.e. base + sugar but lacking 5'-phosphate
  modified_base 1, 3, 4, 5, 10, 12, 13, 14, 16, 17: /mod_base = "2'-O-methyl corresponding base"
  modified_base 21: /mod_base = "5'-thio thymidine"
  modified_base 2, 6, 7, 8, 9, 11, 15, 18, 19: /mod_base = "2'-hydroxy corresponding base"
uguuuggagcaucuacuaatt

SEQ ID NO: 546 - DNA, 21 bp, artificial sequence
  siRNA cross-reactive to human and rhesus monkey Eg5
  5'-terminal nucleic acid is a nucleoside, i.e. base + sugar but lacking 5'-phosphate
  modified_base 2, 5, 14, 18: /mod_base = "2'-O-methyl corresponding base"
  modified_base 21: /mod_base = "5'-thio thymidine"
  modified_base 1, 3, 4, 6, 7, 8, 9, 10, 11, 12, 13, 15, 16, 17, 19: /mod_base = "2'-hydroxy corresponding base"
uuaguagaugcuccaaacatt

SEQ ID NO: 547 - DNA, 21 bp, artificial sequence
  siRNA cross-reactive to human and rhesus monkey Eg5
  5'-terminal nucleic acid is a nucleoside, i.e. base + sugar but lacking 5'-phosphate
  modified_base 5, 6, 8, 11, 13, 15, 18: /mod_base = "2'-O-methyl corresponding base"
  modified_base 21: /mod_base = "5'-thio thymidine"
  modified_base 1, 2, 3, 4, 7, 9, 10, 12, 14, 16, 17, 19: /mod_base = "2'-hydroxy corresponding base"
gaaauuacaguacacaacatt

SEQ ID NO: 548 - DNA, 21 bp, artificial sequence
  siRNA cross-reactive to human and rhesus monkey Eg5
  5'-terminal nucleic acid is a nucleoside, i.e. base + sugar but lacking 5'-phosphate
  modified_base 8, 13: /mod_base = "2'-O-methyl corresponding base"
  modified_base 21: /mod_base = "5'-thio thymidine"
  modified_base 1, 2, 3, 4, 5, 6, 7, 9, 10, 11, 12, 14, 15, 16, 17, 18, 19: /mod_base = "2'-hydroxy corresponding base"
uguuguguacuguaauuuctt

SEQ ID NO: 549 - DNA, 21 bp, artificial sequence
  siRNA cross-reactive to human and rhesus monkey Eg5
  5'-terminal nucleic acid is a nucleoside, i.e. base + sugar but lacking 5'-phosphate
  modified_base 2, 3, 4, 7, 8, 11, 13, 17, 18, 19: /mod_base = "2'-O-methyl corresponding base"
  modified_base 21: /mod_base = "5'-thio thymidine"
  modified_base 1, 5, 6, 9, 10, 12, 14, 15, 16: /mod_base = "2'-hydroxy corresponding base"
acuugaccaguguaaaucutt

SEQ ID NO: 550 - DNA, 21 bp, artificial sequence
  siRNA cross-reactive to human and rhesus monkey Eg5
  5'-terminal nucleic acid is a nucleoside, i.e. base + sugar but lacking 5'-phosphate
  modified_base 6, 8, 15: /mod_base = "2'-O-methyl corresponding base"
  modified_base 21: /mod_base = "5'-thio thymidine"
  modified_base 1, 2, 3, 4, 5, 7, 9, 10, 11, 12, 13, 14, 16, 17, 18, 19: /mod_base = "2'-hydroxy corresponding base"
agauuuacacuggucaagutt

SEQ ID NO: 551 - DNA, 21 bp, artificial sequence
  siRNA cross-reactive to human and rhesus monkey Eg5
  5'-terminal nucleic acid is a nucleoside, i.e. base + sugar but lacking 5'-phosphate
  modified_base 2, 3, 6, 8, 12, 13, 14, 17, 18, 19: /mod_base = "2'-O-methyl corresponding base"
  modified_base 21: /mod_base = "5'-thio thymidine"
  modified_base 1, 4, 5, 7, 9, 10, 11, 15, 16: /mod_base = "2'-hydroxy corresponding base"
accaguguaaaucugaccutt

SEQ ID NO: 552 - DNA, 21 bp, artificial sequence
  siRNA cross-reactive to human and rhesus monkey Eg5
  5'-terminal nucleic acid is a nucleoside, i.e. base + sugar but lacking 5'-phosphate
  modified_base 5, 11, 13: /mod_base = "2'-O-methyl corresponding base"
  modified_base 21: /mod_base = "5'-thio thymidine"
  modified_base 1, 2, 3, 4, 6, 7, 8, 9, 10, 12, 14, 15, 16, 17, 18, 19: /mod_base = "2'-hydroxy corresponding base"
aggucagauuuacacuggutt

SEQ ID NO: 553 - DNA, 21 bp, artificial sequence
  siRNA cross-reactive to human and rhesus monkey Eg5
  5'-terminal nucleic acid is a nucleoside, i.e. base + sugar but lacking 5'-phosphate
  modified_base 5, 8, 9, 11, 12, 15, 18: /mod_base = "2'-O-methyl corresponding base"
  modified_base 21: /mod_base = "5'-thio thymidine"
  modified_base 1, 2, 3, 4, 6, 7, 10, 13, 14, 16, 17, 19: /mod_base = "2'-hydroxy corresponding base"
agaacaaucauuagcagcatt

SEQ ID NO: 554 - DNA, 21 bp, artificial sequence
  siRNA cross-reactive to human and rhesus monkey Eg5
  5'-terminal nucleic acid is a nucleoside, i.e. base + sugar but lacking 5'-phosphate
  modified_base 7: /mod_base = "2'-O-methyl corresponding base"
  modified_base 21: /mod_base = "5'-thio thymidine"
  modified_base 1, 2, 3, 4, 5, 6, 8, 9, 10, 11, 12, 13, 14, 15, 16, 17, 18, 19: /mod_base = "2'-hydroxy corresponding base"
ugcugcuaaugauuguucutt

SEQ ID NO: 555 - DNA, 21 bp, artificial sequence
  siRNA cross-reactive to human and rhesus monkey Eg5
  5'-terminal nucleic acid is a nucleoside, i.e. base + sugar but lacking 5'-phosphate
  modified_base 1, 4, 6, 12, 13, 14, 17, 18: /mod_base = "2'-O-methyl corresponding base"
  modified_base 21: /mod_base = "5'-thio thymidine"
  modified_base 2, 3, 5, 7, 8, 9, 10, 11, 15, 16, 19: /mod_base = "2'-hydroxy corresponding base"
caauguggaaaccuaacugtt

SEQ ID NO: 556 - DNA, 21 bp, artificial sequence
  siRNA cross-reactive to human and rhesus monkey Eg5
  5'-terminal nucleic acid is a nucleoside, i.e. base + sugar but lacking 5'-phosphate
  modified_base 1, 5, 13, 15: /mod_base = "2'-O-methyl corresponding base"
  modified_base 21: /mod_base = "5'-thio thymidine"
  modified_base 2, 3, 4, 6, 7, 8, 9, 10, 11, 12, 14, 16, 17, 18, 19: /mod_base = "2'-hydroxy corresponding base"
caguuagguuuccacauugtt

SEQ ID NO: 557 - DNA, 21 bp, artificial sequence
  siRNA cross-reactive to human and rhesus monkey Eg5
  5'-terminal nucleic acid is a nucleoside, i.e. base + sugar but lacking 5'-phosphate
  modified_base 2, 3, 11, 13, 18, 19: /mod_base = "2'-O-methyl corresponding base"
  modified_base 21: /mod_base = "5'-thio thymidine"
  modified_base 1, 4, 5, 6, 7, 8, 9, 10, 12, 14, 15, 16, 17: /mod_base = "2'-hydroxy corresponding base"
accaagaagguacaaaauutt

SEQ ID NO: 558 - DNA, 21 bp, artificial sequence
  siRNA cross-reactive to human and rhesus monkey Eg5
  5'-terminal nucleic acid is a nucleoside, i.e. base + sugar but lacking 5'-phosphate
  modified_base 8: /mod_base = "2'-O-methyl corresponding base"
  modified_base 21: /mod_base = "5'-thio thymidine"
  modified_base 1, 2, 3, 4, 5, 6, 7, 9, 10, 11, 12, 13, 14, 15, 16, 17, 18, 19: /mod_base = "2'-hydroxy corresponding base"
aauuuuguaccuucuuggutt

SEQ ID NO: 559 - DNA, 21 bp, artificial sequence
  siRNA cross-reactive to human and rhesus monkey Eg5
  5'-terminal nucleic acid is a nucleoside, i.e. base + sugar but lacking 5'-phosphate
  modified_base 3, 5, 10, 11, 14, 15: /mod_base = "2'-O-methyl corresponding base"
  modified_base 21: /mod_base = "5'-thio thymidine"
  modified_base 1, 2, 4, 6, 7, 8, 9, 12, 13, 16, 17, 18, 19: /mod_base = "2'-hydroxy corresponding base"
gguacaaaauugguugaagtt

SEQ ID NO: 560 - DNA, 21 bp, artificial sequence
  siRNA cross-reactive to human and rhesus monkey Eg5
  5'-terminal nucleic acid is a nucleoside, i.e. base + sugar but lacking 5'-phosphate
  modified_base 4, 8, 16: /mod_base = "2'-O-methyl corresponding base"
  modified_base 21: /mod_base = "5'-thio thymidine"
  modified_base 1, 2, 3, 5, 6, 7, 9, 10, 11, 12, 13, 14, 15, 17, 18, 19: /mod_base = "2'-hydroxy corresponding base"
cuucaaccaauuuuguacctt

SEQ ID NO: 561 - DNA, 21 bp, artificial sequence
  siRNA cross-reactive to human and rhesus monkey Eg5
  5'-terminal nucleic acid is a nucleoside, i.e. base + sugar but lacking 5'-phosphate
  modified_base 3, 5, 9, 10, 12, 13, 14, 16, 17: /mod_base = "2'-O-methyl corresponding base"
  modified_base 21: /mod_base = "5'-thio thymidine"
  modified_base 1, 2, 4, 6, 7, 8, 11, 15, 18, 19: /mod_base = "2'-hydroxy corresponding base"
gguguggauuguucaucaatt

SEQ ID NO: 562 - DNA, 21 bp, artificial sequence
  siRNA cross-reactive to human and rhesus monkey Eg5
  5'-terminal nucleic acid is a nucleoside, i.e. base + sugar but lacking 5'-phosphate
  modified_base 9, 14, 16: /mod_base = "2'-O-methyl corresponding base"
  modified_base 21: /mod_base = "5'-thio thymidine"
  modified_base 1, 2, 3, 4, 5, 6, 7, 8, 10, 11, 12, 13, 15, 17, 18, 19: /mod_base = "2'-hydroxy corresponding base"
uugaugaacaauccacacctt

SEQ ID NO: 563 - DNA, 21 bp, artificial sequence
  siRNA cross-reactive to human and rhesus monkey Eg5
  5'-terminal nucleic acid is a nucleoside, i.e. base + sugar but lacking 5'-phosphate
  modified_base 5, 6, 7, 9, 16, 17, 18: /mod_base = "2'-O-methyl corresponding base"
  modified_base 21: /mod_base = "5'-thio thymidine"
  modified_base 1, 2, 3, 4, 8, 10, 11, 12, 13, 14, 15, 19: /mod_base = "2'-hydroxy corresponding base"
agaguucacaaaaagcccatt

SEQ ID NO: 564 - DNA, 21 bp, artificial sequence
  siRNA cross-reactive to human and rhesus monkey Eg5
  5'-terminal nucleic acid is a nucleoside, i.e. base + sugar but lacking 5'-phosphate
  modified_base 21: /mod_base = "5'-thio thymidine"
  modified_base 1..19: /mod_base = "2'-hydroxy corresponding base"
ugggcuuuuugugaacucutt

SEQ ID NO: 565 - DNA, 21 bp, artificial sequence
  siRNA cross-reactive to human and rhesus monkey Eg5
  5'-terminal nucleic acid is a nucleoside, i.e. base + sugar but lacking 5'-phosphate
  modified_base 1, 4, 7, 8, 12, 13, 17, 18: /mod_base = "2'-O-methyl corresponding base"
  modified_base 21: /mod_base = "5'-thio thymidine"
  modified_base 2, 3, 5, 6, 9, 10, 11, 14, 15, 16, 19: /mod_base = "2'-hydroxy corresponding base"
ugauagcuaaauuaaaccatt

SEQ ID NO: 566 - DNA, 21 bp, artificial sequence
  siRNA cross-reactive to human and rhesus monkey Eg5
  5'-terminal nucleic acid is a nucleoside, i.e. base + sugar but lacking 5'-phosphate
  modified_base 6, 11, 15, 18: /mod_base = "2'-O-methyl corresponding base"
  modified_base 21: /mod_base = "5'-thio thymidine"
  modified_base 1, 2, 3, 4, 5, 7, 8, 9, 10, 12, 13, 14, 16, 17, 19: /mod_base = "2'-hydroxy corresponding base"
ugguuuaauuuagcuaucatt

SEQ ID NO: 567 - DNA, 21 bp, artificial sequence
  siRNA cross-reactive to human and rhesus monkey Eg5
  5'-terminal nucleic acid is a nucleoside, i.e. base + sugar but lacking 5'-phosphate
  modified_base 3, 7, 8, 9, 14, 18, 19: /mod_base = "2'-O-methyl corresponding base"
  modified_base 21: /mod_base = "5'-thio thymidine"
  modified_base 1, 2, 4, 5, 6, 10, 11, 12, 13, 15, 16, 17: /mod_base = "2'-hydroxy corresponding base"
aauaagccugaagugaauctt

SEQ ID NO: 568 - DNA, 21 bp, artificial sequence
  siRNA cross-reactive to human and rhesus monkey Eg5
  5'-terminal nucleic acid is a nucleoside, i.e. base + sugar but lacking 5'-phosphate
  modified_base 5, 10, 16: /mod_base = "2'-O-methyl corresponding base"
  modified_base 21: /mod_base = "5'-thio thymidine"
  modified_base 1, 2, 3, 4, 6, 7, 8, 9, 11, 12, 13, 14, 15, 17, 18, 19: /mod_base = "2'-hydroxy corresponding base"
gauucacuucaggcuuauutt

SEQ ID NO: 569 - DNA, 21 bp, artificial sequence
  siRNA cross-reactive to human and rhesus monkey Eg5
  5'-terminal nucleic acid is a nucleoside, i.e. base + sugar but lacking 5'-phosphate
  modified_base 1, 4, 5, 8, 9, 12, 14, 17, 19: /mod_base = "2'-O-methyl corresponding base"
  modified_base 21: /mod_base = "5'-thio thymidine"
  modified_base 2, 3, 6, 7, 10, 11, 13, 15, 16, 18: /mod_base = "2'-hydroxy corresponding base"
caguugaccaacacaaugctt

SEQ ID NO: 570 - DNA, 21 bp, artificial sequence
  siRNA cross-reactive to human and rhesus monkey Eg5
  5'-terminal nucleic acid is a nucleoside, i.e. base + sugar but lacking 5'-phosphate
  modified_base 2, 14: /mod_base = "2'-O-methyl corresponding base"
  modified_base 21: /mod_base = "5'-thio thymidine"
  modified_base 1, 3, 4, 5, 6, 7, 8, 9, 10, 11, 12, 13, 15, 16, 17, 18, 19: /mod_base = "2'-hydroxy corresponding base"
gcauuguguuggucaacugtt

SEQ ID NO: 571 - DNA, 21 bp, artificial sequence
  siRNA cross-reactive to human and rhesus monkey Eg5
  5'-terminal nucleic acid is a nucleoside, i.e. base + sugar but lacking 5'-phosphate
  modified_base 1, 4, 6, 10, 11, 13, 14, 15, 17, 18: /mod_base = "2'-O-methyl corresponding base"
  modified_base 21: /mod_base = "5'-thio thymidine"
  modified_base 2, 3, 5, 7, 8, 9, 12, 16, 19: /mod_base = "2'-hydroxy corresponding base"
ugguguggauuguucaucatt

SEQ ID NO: 572 - DNA, 21 bp, artificial sequence
  siRNA cross-reactive to human and rhesus monkey Eg5
  5'-terminal nucleic acid is a nucleoside, i.e. base + sugar but lacking 5'-phosphate
  modified_base 8, 13, 15, 18: /mod_base = "2'-O-methyl corresponding base"
  modified_base 21: /mod_base = "5'-thio thymidine"
  modified_base 1, 2, 3, 4, 5, 6, 7, 9, 10, 11, 12, 14, 16, 17, 19: /mod_base = "2'-hydroxy corresponding base"
ugaugaacaauccacaccatt

SEQ ID NO: 573 - DNA, 21 bp, artificial sequence
  siRNA cross-reactive to human and rhesus monkey Eg5
  5'-terminal nucleic acid is a nucleoside, i.e. base + sugar but lacking 5'-phosphate
  modified_base 2, 3, 4, 6, 7, 8, 9, 12, 17, 18, 19: /mod_base = "2'-O-methyl corresponding base"
  modified_base 21: /mod_base = "5'-thio thymidine"
  modified_base 1, 5, 10, 11, 13, 14, 15, 16: /mod_base = "2'-hydroxy corresponding base"
auucacccugacagaguuctt

SEQ ID NO: 574 - DNA, 21 bp, artificial sequence
  siRNA cross-reactive to human and rhesus monkey Eg5
  5'-terminal nucleic acid is a nucleoside, i.e. base + sugar but lacking 5'-phosphate
  modified_base 10: /mod_base = "2'-O-methyl corresponding base"
  modified_base 21: /mod_base = "5'-thio thymidine"
  modified_base 1, 2, 3, 4, 5, 6, 7, 8, 9, 11, 12, 13, 14, 15, 16, 17, 18, 19: /mod_base = "2'-hydroxy corresponding base"
gaacucugucagggugaautt

SEQ ID NO: 575 - DNA, 21 bp, artificial sequence
  siRNA cross-reactive to human and rhesus monkey Eg5
  5'-terminal nucleic acid is a nucleoside, i.e. base + sugar but lacking 5'-phosphate
  modified_base 1, 6, 7, 8, 9, 11, 12, 13, 16, 19: /mod_base = "2'-O-methyl corresponding base"
  modified_base 21: /mod_base = "5'-thio thymidine"
  modified_base 2, 3, 4, 5, 10, 14, 15, 17, 18: /mod_base = "2'-hydroxy corresponding base"
uaagaccuuauuugguaautt

SEQ ID NO: 576 - DNA, 21 bp, artificial sequence
  siRNA cross-reactive to human and rhesus monkey Eg5
  5'-terminal nucleic acid is a nucleoside, i.e. base + sugar but lacking 5'-phosphate
  modified_base 3, 6, 10, 18: /mod_base = "2'-O-methyl corresponding base"
  modified_base 21: /mod_base = "5'-thio thymidine"
  modified_base 1, 2, 4, 5, 7, 8, 9, 11, 12, 13, 14, 15, 16, 17, 19: /mod_base = "2'-hydroxy corresponding base"
auuaccaaauaaggucuuatt

SEQ ID NO: 577 - DNA, 21 bp, artificial sequence
  siRNA cross-reactive to human and rhesus monkey Eg5
  5'-terminal nucleic acid is a nucleoside, i.e. base + sugar but lacking 5'-phosphate
  modified_base 4, 7, 9, 15, 16, 17: /mod_base = "2'-O-methyl corresponding base"
  modified_base 21: /mod_base = "5'-thio thymidine"
  modified_base 1, 2, 3, 5, 6, 8, 10, 11, 12, 13, 14, 18, 19: /mod_base = "2'-hydroxy corresponding base"
aagcaauguggaaaccuaatt

SEQ ID NO: 578 - DNA, 21 bp, artificial sequence
  siRNA cross-reactive to human and rhesus monkey Eg5
  5'-terminal nucleic acid is a nucleoside, i.e. base + sugar but lacking 5'-phosphate
  modified_base 2, 10, 12: /mod_base = "2'-O-methyl corresponding base"
  modified_base 21: /mod_base = "5'-thio thymidine"
  modified_base 1, 3, 4, 5, 6, 7, 8, 9, 11, 13, 14, 15, 16, 17, 18, 19: /mod_base = "2'-hydroxy corresponding base"
uuagguuuccacauugcuutt

SEQ ID NO: 579 - DNA, 21 bp, artificial sequence
  siRNA cross-reactive to human and rhesus monkey Eg5
  5'-terminal nucleic acid is a nucleoside, i.e. base + sugar but lacking 5'-phosphate
  modified_base 1, 2, 3, 8, 9, 13, 15, 16, 17, 18: /mod_base = "2'-O-methyl corresponding base"
  modified_base 21: /mod_base = "5'-thio thymidine"
  modified_base 4, 5, 6, 7, 10, 11, 12, 14, 19: /mod_base = "2'-hydroxy corresponding base"
ucugaaacuggauaucccatt

SEQ ID NO: 580 - DNA, 21 bp, artificial sequence
  siRNA cross-reactive to human and rhesus monkey Eg5
  5'-terminal nucleic acid is a nucleoside, i.e. base + sugar but lacking 5'-phosphate
  modified_base 6, 10, 16: /mod_base = "2'-O-methyl corresponding base"
  modified_base 21: /mod_base = "5'-thio thymidine"
  modified_base 1, 2, 3, 4, 5, 7, 8, 9, 11, 12, 13, 14, 15, 17, 18, 19: /mod_base = "2'-hydroxy corresponding base"
ugggauauccaguuucagatt

SEQ ID NO: 581 - DNA, 21 bp, artificial sequence
  siRNA reactive to human Eg5
  5'-terminal nucleic acid is a nucleoside, i.e. base + sugar but lacking 5'-phosphate
  modified_base 1, 2, 4, 5, 7, 8, 10, 13, 16, 18, 19: /mod_base = "2'-O-methyl corresponding base"
  modified_base 21: /mod_base = "5'-thio thymidine"
  modified_base 3, 6, 9, 11, 12, 14, 15, 17: /mod_base = "2'-hydroxy corresponding base"
ccauuacuacaguagcacutt

SEQ ID NO: 582 - DNA, 21 bp, artificial sequence
  siRNA reactive to human Eg5
  5'-terminal nucleic acid is a nucleoside, i.e. base + sugar but lacking 5'-phosphate
  modified_base 6, 11, 14: /mod_base = "2'-O-methyl corresponding base"
  modified_base 21: /mod_base = "5'-thio thymidine"
  modified_base 1, 2, 3, 4, 5, 7, 8, 9, 10, 12, 13, 15, 16, 17, 18, 19: /mod_base = "2'-hydroxy corresponding base"
agugcuacuguaguaauggtt

SEQ ID NO: 583 - DNA, 21 bp, artificial sequence
  siRNA reactive to human Eg5
  5'-terminal nucleic acid is a nucleoside, i.e. base + sugar but lacking 5'-phosphate
  modified_base 2, 3, 4, 7, 10, 11, 13, 15, 16, 17, 18, 19: /mod_base = "2'-O-methyl corresponding base"
  modified_base 21: /mod_base = "5'-thio thymidine"
  modified_base 1, 5, 6, 8, 9, 12, 14: /mod_base = "2'-hydroxy corresponding base"
aucuggcaaccauauuucutt

SEQ ID NO: 584 - DNA, 21 bp, artificial sequence
  siRNA reactive to human Eg5
  5'-terminal nucleic acid is a nucleoside, i.e. base + sugar but lacking 5'-phosphate
  modified_base 6, 15: /mod_base = "2'-O-methyl corresponding base"
  modified_base 21: /mod_base = "5'-thio thymidine"
  modified_base 1, 2, 3, 4, 5, 7, 8, 9, 10, 11, 12, 13, 14, 16, 17, 18, 19: /mod_base = "2'-hydroxy corresponding base"
agaaauaugguugccagautt

SEQ ID NO: 585 - DNA, 21 bp, artificial sequence
  siRNA reactive to human Eg5
  5'-terminal nucleic acid is a nucleoside, i.e. base + sugar but lacking 5'-phosphate
  modified_base 3, 6, 7, 11, 12, 16, 17: /mod_base = "2'-O-methyl corresponding base"
  modified_base 21: /mod_base = "5'-thio thymidine"
  modified_base 1, 2, 4, 5, 8, 9, 10, 13, 14, 15, 18, 19: /mod_base = "2'-hydroxy corresponding base"
gauagcuaaauuaaaccaatt

SEQ ID NO: 586 - DNA, 21 bp, artificial sequence
  siRNA reactive to human Eg5
  5'-terminal nucleic acid is a nucleoside, i.e. base + sugar but lacking 5'-phosphate
  modified_base 7, 12, 16: /mod_base = "2'-O-methyl corresponding base"
  modified_base 21: /mod_base = "5'-thio thymidine"
  modified_base 1, 2, 3, 4, 5, 6, 8, 9, 10, 11, 13, 14, 15, 17, 18, 19: /mod_base = "2'-hydroxy corresponding base"
uugguuuaauuuagcuauctt

SEQ ID NO: 587 - DNA, 21 bp, artificial sequence
  siRNA reactive to human Eg5
  5'-terminal nucleic acid is a nucleoside, i.e. base + sugar but lacking 5'-phosphate
  modified_base 4, 6, 7, 9, 10, 12, 13, 15, 18: /mod_base = "2'-O-methyl corresponding base"
  modified_base 21: /mod_base = "5'-thio thymidine"
  modified_base 1, 2, 3, 5, 8, 11, 14, 16, 17, 19: /mod_base = "2'-hydroxy corresponding base"
agauaccauuacuacaguatt

SEQ ID NO: 588 - DNA, 21 bp, artificial sequence
  siRNA reactive to human Eg5
  5'-terminal nucleic acid is a nucleoside, i.e. base + sugar but lacking 5'-phosphate
  modified_base 1, 6, 9, 15: /mod_base = "2'-O-methyl corresponding base"
  modified_base 21: /mod_base = "5'-thio thymidine"
  modified_base 2, 3, 4, 5, 7, 8, 10, 11, 12, 13, 14, 16, 17, 18, 19: /mod_base = "2'-hydroxy corresponding base"
uacuguaguaaugguaucutt

SEQ ID NO: 589 - DNA, 21 bp, artificial sequence
  siRNA reactive to human Eg5
  5'-terminal nucleic acid is a nucleoside, i.e. base + sugar but lacking 5'-phosphate
  modified_base 3, 4, 6, 7, 8, 10, 11, 14, 15, 18: /mod_base = "2'-O-methyl corresponding base"
  modified_base 21: /mod_base = "5'-thio thymidine"
  modified_base 1, 2, 5, 9, 12, 13, 16, 17, 19: /mod_base = "2'-hydroxy corresponding base"
gauuguucaucaauuggcgtt

SEQ ID NO: 590 - DNA, 21 bp, artificial sequence
  siRNA reactive to human Eg5
  5'-terminal nucleic acid is a nucleoside, i.e. base + sugar but lacking 5'-phosphate
  modified_base 4, 15: /mod_base = "2'-O-methyl corresponding base"
  modified_base 21: /mod_base = "5'-thio thymidine"
  modified_base 1, 2, 3, 5, 6, 7, 8, 9, 10, 11, 12, 13, 14, 16, 17, 18, 19: /mod_base = "2'-hydroxy corresponding base"
cgccaauugaugaacaauctt

SEQ ID NO: 591 - DNA, 21 bp, artificial sequence
  siRNA reactive to human Eg5
  5'-terminal nucleic acid is a nucleoside, i.e. base + sugar but lacking 5'-phosphate
  modified_base 2, 3, 4, 5, 6, 7, 8, 9, 10, 11, 14, 15, 16, 18, 19: /mod_base = "2'-O-methyl corresponding base"
  modified_base 21: /mod_base = "5'-thio thymidine"
  modified_base 1, 12, 13, 17: /mod_base = "2'-hydroxy corresponding base"
gcuuucuccucggcucacutt

SEQ ID NO: 592 - DNA, 21 bp, artificial sequence
  siRNA reactive to human Eg5
  5'-terminal nucleic acid is a nucleoside, i.e. base + sugar but lacking 5'-phosphate
  modified_base 3: /mod_base = "2'-O-methyl corresponding base"
  modified_base 21: /mod_base = "5'-thio thymidine"
  modified_base 1, 2, 4, 5, 6, 7, 8, 9, 10, 11, 12, 13, 14, 15, 16, 17, 18, 19: /mod_base = "2'-hydroxy corresponding base"
agugagccgaggagaaagctt

SEQ ID NO: 593 - DNA, 21 bp, artificial sequence
  siRNA reactive to human Eg5
  5'-terminal nucleic acid is a nucleoside, i.e. base + sugar but lacking 5'-phosphate
  modified_base 7, 8, 11, 12, 15: /mod_base = "2'-O-methyl corresponding base"
  modified_base 21: /mod_base = "5'-thio thymidine"
  modified_base 1, 2, 3, 4, 5, 6, 9, 10, 13, 14, 16, 17, 18, 19: /mod_base = "2'-hydroxy corresponding base"
ggaggauuggcugacaagatt

SEQ ID NO: 594 - DNA, 21 bp, artificial sequence
  siRNA reactive to human Eg5
  5'-terminal nucleic acid is a nucleoside, i.e. base + sugar but lacking 5'-phosphate
  modified_base 7, 11: /mod_base = "2'-O-methyl corresponding base"
  modified_base 21: /mod_base = "5'-thio thymidine"
  modified_base 1, 2, 3, 4, 5, 6, 8, 9, 10, 12, 13, 14, 15, 16, 17, 18, 19: /mod_base = "2'-hydroxy corresponding base"
ucuugucagccaauccucctt

SEQ ID NO: 595 - DNA, 21 bp, artificial sequence
  siRNA reactive to human Eg5
  5'-terminal nucleic acid is a nucleoside, i.e. base + sugar but lacking 5'-phosphate
  modified_base 1, 4, 11, 13, 15, 16, 17: /mod_base = "2'-O-methyl corresponding base"
  modified_base 21: /mod_base = "5'-thio thymidine"
  modified_base 2, 3, 5, 6, 7, 8, 9, 10, 12, 14, 18, 19: /mod_base = "2'-hydroxy corresponding base"
uaaugaagaguauaccuggtt

SEQ ID NO: 596 - DNA, 21 bp, artificial sequence
  siRNA reactive to human Eg5
  5'-terminal nucleic acid is a nucleoside, i.e. base + sugar but lacking 5'-phosphate
  modified_base 2, 6, 8, 15, 18: /mod_base = "2'-O-methyl corresponding base"
  modified_base 21: /mod_base = "5'-thio thymidine"
  modified_base 1, 3, 4, 5, 7, 9, 10, 11, 12, 13, 14, 16, 17, 19: /mod_base = "2'-hydroxy corresponding base"
ccagguauacucuucauuatt

SEQ ID NO: 597 - DNA, 21 bp, artificial sequence
  siRNA reactive to human Eg5
  5'-terminal nucleic acid is a nucleoside, i.e. base + sugar but lacking 5'-phosphate
  modified_base 1, 2, 3, 4, 6, 7, 11, 12, 14, 15, 16, 18: /mod_base = "2'-O-methyl corresponding base"
  modified_base 21: /mod_base = "5'-thio thymidine"
  modified_base 5, 8, 9, 10, 13, 17, 19: /mod_base = "2'-hydroxy corresponding base"
uuucaccaaaccauuuguatt

SEQ ID NO: 598 - DNA, 21 bp, artificial sequence
  siRNA reactive to human Eg5
  5'-terminal nucleic acid is a nucleoside, i.e. base + sugar but lacking 5'-phosphate
  modified_base 1, 3: /mod_base = "2'-O-methyl corresponding base"
  modified_base 21: /mod_base = "5'-thio thymidine"
  modified_base 2, 4, 5, 6, 7, 8, 9, 10, 11, 12, 13, 14, 15, 16, 17, 18, 19: /mod_base = "2'-hydroxy corresponding base"
uacaaaugguuuggugaaatt

SEQ ID NO: 599 - DNA, 21 bp, artificial sequence
  siRNA reactive to human Eg5
  5'-terminal nucleic acid is a nucleoside, i.e. base + sugar but lacking 5'-phosphate
  modified_base 1, 2, 3, 5, 6, 13, 15, 17: /mod_base = "2'-O-methyl corresponding base"
  modified_base 21: /mod_base = "5'-thio thymidine"
  modified_base 4, 7, 8, 9, 10, 11, 12, 14, 16, 18, 19: /mod_base = "2'-hydroxy corresponding base"
cuuauuaaggaguauacggtt

SEQ ID NO: 600 - DNA, 21 bp, artificial sequence
  siRNA reactive to human Eg5
  5'-terminal nucleic acid is a nucleoside, i.e. base + sugar but lacking 5'-phosphate
  modified_base 4, 6, 13, 16: /mod_base = "2'-O-methyl corresponding base"
  modified_base 21: /mod_base = "5'-thio thymidine"
  modified_base 1, 2, 3, 5, 7, 8, 9, 10, 11, 12, 14, 15, 17, 18, 19: /mod_base = "2'-hydroxy corresponding base"
ccguauacuccuuaauaagtt

SEQ ID NO: 601 - DNA, 21 bp, artificial sequence
  siRNA reactive to human Eg5
  5'-terminal nucleic acid is a nucleoside, i.e. base + sugar but lacking 5'-phosphate
  modified_base 5, 6, 10, 14, 16: /mod_base = "2'-O-methyl corresponding base"
  modified_base 21: /mod_base = "5'-thio thymidine"
  modified_base 1, 2, 3, 4, 7, 8, 9, 11, 12, 13, 15, 17, 18, 19: /mod_base = "2'-hydroxy corresponding base"
gaaaucagauggacguaagtt

SEQ ID NO: 602 - DNA, 21 bp, artificial sequence
  siRNA reactive to human Eg5
  5'-terminal nucleic acid is a nucleoside, i.e. base + sugar but lacking 5'-phosphate
  modified_base 3, 9: /mod_base = "2'-O-methyl corresponding base"
  modified_base 21: /mod_base = "5'-thio thymidine"
  modified_base 1, 2, 4, 5, 6, 7, 8, 10, 11, 12, 13, 14, 15, 16, 17, 18, 19: /mod_base = "2'-hydroxy corresponding base"
cuuacguccaucugauuuctt

SEQ ID NO: 603 - DNA, 21 bp, artificial sequence
  siRNA reactive to human Eg5
  5'-terminal nucleic acid is a nucleoside, i.e. base + sugar but lacking 5'-phosphate
  modified_base 1, 5, 7, 8, 11, 13, 17: /mod_base = "2'-O-methyl corresponding base"
  modified_base 21: /mod_base = "5'-thio thymidine"
  modified_base 2, 3, 4, 6, 9, 10, 12, 14, 15, 16, 18, 19: /mod_base = "2'-hydroxy corresponding base"
cagaugucagcauaagcgatt

SEQ ID NO: 604 - DNA, 21 bp, artificial sequence
  siRNA reactive to human Eg5
  5'-terminal nucleic acid is a nucleoside, i.e. base + sugar but lacking 5'-phosphate
  modified_base 6, 14: /mod_base = "2'-O-methyl corresponding base"
  modified_base 21: /mod_base = "5'-thio thymidine"
  modified_base 1, 2, 3, 4, 5, 7, 8, 9, 10, 11, 12, 13, 15, 16, 17, 18, 19: /mod_base = "2'-hydroxy corresponding base"
ucgcuuaugcugacaucugtt

SEQ ID NO: 605 - DNA, 21 bp, artificial sequence
  siRNA reactive to human Eg5
  5'-terminal nucleic acid is a nucleoside, i.e. base + sugar but lacking 5'-phosphate
  modified_base 2, 3, 4, 7, 8, 9, 10, 13, 14, 16, 18, 19: /mod_base = "2'-O-methyl corresponding base"
  modified_base 21: /mod_base = "5'-thio thymidine"
  modified_base 1, 5, 6, 11, 12, 15, 17: /mod_base = "2'-hydroxy corresponding base"
aucuaacccuaguuguauctt

SEQ ID NO: 606 - DNA, 21 bp, artificial sequence
  siRNA reactive to human Eg5
  5'-terminal nucleic acid is a nucleoside, i.e. base + sugar but lacking 5'-phosphate
  modified_base 3, 5, 9, 15: /mod_base = "2'-O-methyl corresponding base"
  modified_base 21: /mod_base = "5'-thio thymidine"
  modified_base 1, 2, 4, 6, 7, 8, 10, 11, 12, 13, 14, 16, 17, 18, 19: /mod_base = "2'-hydroxy corresponding base"
gauacaacuaggguuagautt

SEQ ID NO: 607 - DNA, 21 bp, artificial sequence
  siRNA reactive to human Eg5
  5'-terminal nucleic acid is a nucleoside, i.e. base + sugar but lacking 5'-phosphate
  modified_base 6, 7, 8, 10, 11, 16, 17: /mod_base = "2'-O-methyl corresponding base"
  modified_base 21: /mod_base = "5'-thio thymidine"
  modified_base 1, 2, 3, 4, 5, 9, 12, 13, 14, 15, 18, 19: /mod_base = "2'-hydroxy corresponding base"
aagagcuuguuaaaaucggtt

SEQ ID NO: 608 - DNA, 21 bp, artificial sequence
  siRNA reactive to human Eg5
  5'-terminal nucleic acid is a nucleoside, i.e. base + sugar but lacking 5'-phosphate
  modified_base 8, 11: /mod_base = "2'-O-methyl corresponding base"
  modified_base 21: /mod_base = "5'-thio thymidine"
  modified_base 1, 2, 3, 4, 5, 6, 7, 9, 10, 12, 13, 14, 15, 16, 17, 18, 19: /mod_base = "2'-hydroxy corresponding base"
ccgauuuuaacaagcucuutt

SEQ ID NO: 609 - DNA, 21 bp, artificial sequence
  siRNA reactive to human Eg5
  5'-terminal nucleic acid is a nucleoside, i.e. base + sugar but lacking 5'-phosphate
  modified_base 1, 2, 9, 11, 13: /mod_base = "2'-O-methyl corresponding base"
  modified_base 21: /mod_base = "5'-thio thymidine"
  modified_base 3, 4, 5, 6, 7, 8, 10, 12, 14, 15, 16, 17, 18, 19: /mod_base = "2'-hydroxy corresponding base"
uuaaggaguauacggaggatt

SEQ ID NO: 610 - DNA, 21 bp, artificial sequence
  siRNA reactive to human Eg5
  5'-terminal nucleic acid is a nucleoside, i.e. base + sugar but lacking 5'-phosphate
  modified_base 8, 10, 17: /mod_base = "2'-O-methyl corresponding base"
  modified_base 21: /mod_base = "5'-thio thymidine"
  modified_base 1, 2, 3, 4, 5, 6, 7, 9, 11, 12, 13, 14, 15, 16, 18, 19: /mod_base = "2'-hydroxy corresponding base"
uccuccguauacuccuuaatt

SEQ ID NO: 611 - DNA, 21 bp, artificial sequence
  siRNA reactive to human Eg5
  5'-terminal nucleic acid is a nucleoside, i.e. base + sugar but lacking 5'-phosphate
  modified_base 1, 2, 4, 7, 9, 13, 15, 17, 19: /mod_base = "2'-O-methyl corresponding base"
  modified_base 21: /mod_base = "5'-thio thymidine"
  modified_base 3, 5, 6, 8, 10, 11, 12, 14, 16, 18: /mod_base = "2'-hydroxy corresponding base"
uugcaauguaaauacguautt

SEQ ID NO: 612 - DNA, 21 bp, artificial sequence
  siRNA reactive to human Eg5
  5'-terminal nucleic acid is a nucleoside, i.e. base + sugar but lacking 5'-phosphate
  modified_base 2, 6, 10, 12, 17: /mod_base = "2'-O-methyl corresponding base"
  modified_base 21: /mod_base = "5'-thio thymidine"
  modified_base 1, 3, 4, 5, 7, 8, 9, 11, 13, 14, 15, 16, 18, 19: /mod_base = "2'-hydroxy corresponding base"
auacguauuuacauugcaatt

SEQ ID NO: 613 - DNA, 21 bp, artificial sequence
  siRNA reactive to human Eg5
  5'-terminal nucleic acid is a nucleoside, i.e. base + sugar but lacking 5'-phosphate
  modified_base 1, 2, 3, 6, 7, 8, 9, 12, 13, 15, 17, 18, 19: /mod_base = "2'-O-methyl corresponding base"
  modified_base 21: /mod_base = "5'-thio thymidine"
  modified_base 4, 5, 10, 11, 14, 16: /mod_base = "2'-hydroxy corresponding base"
ucuaacccuaguuguaucctt

SEQ ID NO: 614 - DNA, 21 bp, artificial sequence
  siRNA reactive to human Eg5
  5'-terminal nucleic acid is a nucleoside, i.e. base + sugar but lacking 5'-phosphate
  modified_base 4, 6, 10, 16: /mod_base = "2'-O-methyl corresponding base"
  modified_base 21: /mod_base = "5'-thio thymidine"
  modified_base 1, 2, 3, 5, 7, 8, 9, 11, 12, 13, 14, 15, 17, 18, 19: /mod_base = "2'-hydroxy corresponding base"
ggauacaacuaggguuagatt

SEQ ID NO: 615 - DNA, 21 bp, artificial sequence
  siRNA reactive to human Eg5
  5'-terminal nucleic acid is a nucleoside, i.e. base + sugar but lacking 5'-phosphate
  modified_base 1, 3, 5, 7, 8, 9, 10, 11, 12, 13, 14, 15, 16, 19: /mod_base = "2'-O-methyl corresponding base"
  modified_base 21: /mod_base = "5'-thio thymidine"
  modified_base 2, 4, 6, 17, 18: /mod_base = "2'-hydroxy corresponding base"
cauguaucuuuuucucgautt

SEQ ID NO: 616 - DNA, 21 bp, artificial sequence
  siRNA reactive to human Eg5
  5'-terminal nucleic acid is a nucleoside, i.e. base + sugar but lacking 5'-phosphate
  modified_base 14, 16: /mod_base = "2'-O-methyl corresponding base"
  modified_base 21: /mod_base = "5'-thio thymidine"
  modified_base 1, 2, 3, 4, 5, 6, 7, 8, 9, 10, 11, 12, 13, 15, 17, 18, 19: /mod_base = "2'-hydroxy corresponding base"
aucgagaaaaagauacaugtt

SEQ ID NO: 617 - DNA, 21 bp, artificial sequence
  siRNA reactive to human Eg5
  5'-terminal nucleic acid is a nucleoside, i.e. base + sugar but lacking 5'-phosphate
  modified_base 3, 5, 6, 9, 11, 15, 18: /mod_base = "2'-O-methyl corresponding base"
  modified_base 21: /mod_base = "5'-thio thymidine"
  modified_base 1, 2, 4, 7, 8, 10, 12, 13, 14, 16, 17, 19: /mod_base = "2'-hydroxy corresponding base"
gaugucagcauaagcgaugtt

SEQ ID NO: 618 - DNA, 21 bp, artificial sequence
  siRNA reactive to human Eg5
  5'-terminal nucleic acid is a nucleoside, i.e. base + sugar but lacking 5'-phosphate
  modified_base 1, 8, 16: /mod_base = "2'-O-methyl corresponding base"
  modified_base 21: /mod_base = "5'-thio thymidine"
  modified_base 2, 3, 4, 5, 6, 7, 9, 10, 11, 12, 13, 14, 15, 17, 18, 19: /mod_base = "2'-hydroxy corresponding base"
caucgcuuaugcugacauctt

SEQ ID NO: 619 - DNA, 21 bp, artificial sequence
  siRNA reactive to human Eg5
  5'-terminal nucleic acid is a nucleoside, i.e. base + sugar but lacking 5'-phosphate
  modified_base 1, 2, 3, 4, 7, 11, 13, 16, 18, 19: /mod_base = "2'-O-methyl corresponding base"
  modified_base 21: /mod_base = "5'-thio thymidine"
  modified_base 5, 6, 8, 9, 10, 12, 14, 15, 17: /mod_base = "2'-hydroxy corresponding base"
ucccaacagguacgacacctt

SEQ ID NO: 620 - DNA, 21 bp, artificial sequence
  siRNA reactive to human Eg5
  5'-terminal nucleic acid is a nucleoside, i.e. base + sugar but lacking 5'-phosphate
  modified_base 8: /mod_base = "2'-O-methyl corresponding base"
  modified_base 21: /mod_base = "5'-thio thymidine"
  modified_base 1, 2, 3, 4, 5, 6, 7, 9, 10, 11, 12, 13, 14, 15, 16, 17, 18, 19: /mod_base = "2'-hydroxy corresponding base"
ggugucguaccuguugggatt

SEQ ID NO: 621 - DNA, 21 bp, artificial sequence
  siRNA reactive to human Eg5
  5'-terminal nucleic acid is a nucleoside, i.e. base + sugar but lacking 5'-phosphate
  modified_base 1, 3, 4, 5, 7, 10, 14, 15, 16, 19: /mod_base = "2'-O-methyl corresponding base"
  modified_base 21: /mod_base = "5'-thio thymidine"
  modified_base 2, 6, 8, 9, 11, 12, 13, 17, 18: /mod_base = "2'-hydroxy corresponding base"
ugcucacgaugaguuuagutt

SEQ ID NO: 622 - DNA, 21 bp, artificial sequence
  siRNA reactive to human Eg5
  5'-terminal nucleic acid is a nucleoside, i.e. base + sugar but lacking 5'-phosphate
  modified_base 3, 9, 18: /mod_base = "2'-O-methyl corresponding base"
  modified_base 21: /mod_base = "5'-thio thymidine"
  modified_base 1, 2, 4, 5, 6, 7, 8, 10, 11, 12, 13, 14, 15, 16, 17, 19: /mod_base = "2'-hydroxy corresponding base"
acuaaacucaucgugagcatt

SEQ ID NO: 623 - DNA, 21 bp, artificial sequence
  siRNA reactive to human Eg5
  5'-terminal nucleic acid is a nucleoside, i.e. base + sugar but lacking 5'-phosphate
  modified_base 5, 6, 7, 9, 10, 15, 16: /mod_base = "2'-O-methyl corresponding base"
  modified_base 21: /mod_base = "5'-thio thymidine"
  modified_base 1, 2, 3, 4, 8, 11, 12, 13, 14, 17, 18, 19: /mod_base = "2'-hydroxy corresponding base"
agagcuuguuaaaaucggatt

SEQ ID NO: 624 - DNA, 21 bp, artificial sequence
  siRNA reactive to human Eg5
  5'-terminal nucleic acid is a nucleoside, i.e. base + sugar but lacking 5'-phosphate
  modified_base 9, 12: /mod_base = "2'-O-methyl corresponding base"
  modified_base 21: /mod_base = "5'-thio thymidine"
  modified_base 1, 2, 3, 4, 5, 6, 7, 8, 10, 11, 13, 14, 15, 16, 17, 18, 19: /mod_base = "2'-hydroxy corresponding base"
uccgauuuuaacaagcucutt

SEQ ID NO: 625 - DNA, 21 bp, artificial sequence
  siRNA reactive to human Eg5
  5'-terminal nucleic acid is a nucleoside, i.e. base + sugar but lacking 5'-phosphate
  modified_base 2, 4, 6, 12, 14, 15, 16, 18: /mod_base = "2'-O-methyl corresponding base"
  modified_base 21: /mod_base = "5'-thio thymidine"
  modified_base 1, 3, 5, 7, 8, 9, 10, 11, 13, 17, 19: /mod_base = "2'-hydroxy corresponding base"
gcguacaagaacaucuauatt

SEQ ID NO: 626 - DNA, 21 bp, artificial sequence
  siRNA reactive to human Eg5
  5'-terminal nucleic acid is a nucleoside, i.e. base + sugar but lacking 5'-phosphate
  modified_base 1, 3, 15: /mod_base = "2'-O-methyl corresponding base"
  modified_base 21: /mod_base = "5'-thio thymidine"
  modified_base 2, 4, 5, 6, 7, 8, 9, 10, 11, 12, 13, 14, 16, 17, 18, 19: /mod_base = "2'-hydroxy corresponding base"
uauagauguucuuguacgctt

SEQ ID NO: 627 - DNA, 21 bp, artificial sequence
  siRNA reactive to human Eg5
  5'-terminal nucleic acid is a nucleoside, i.e. base + sugar but lacking 5'-phosphate
  modified_base 5, 6, 8, 12, 13, 16, 18, 19: /mod_base = "2'-O-methyl corresponding base"
  modified_base 21: /mod_base = "5'-thio thymidine"
  modified_base 1, 2, 3, 4, 7, 9, 10, 11, 14, 15, 17: /mod_base = "2'-hydroxy corresponding base"
gagguuguaagccaauguutt

SEQ ID NO: 628 - DNA, 21 bp, artificial sequence
  siRNA reactive to human Eg5
  5'-terminal nucleic acid is a nucleoside, i.e. base + sugar but lacking 5'-phosphate
  modified_base 3, 11, 13: /mod_base = "2'-O-methyl corresponding base"
  modified_base 21: /mod_base = "5'-thio thymidine"
  modified_base 1, 2, 4, 5, 6, 7, 8, 9, 10, 12, 14, 15, 16, 17, 18, 19: /mod_base = "2'-hydroxy corresponding base"
aacauuggcuuacaaccuctt

SEQ ID NO: 629 - DNA, 21 bp, artificial sequence
  siRNA reactive to human Eg5
  5'-terminal nucleic acid is a nucleoside, i.e. base + sugar but lacking 5'-phosphate
  modified_base 3, 7, 9, 12, 14, 15, 17: /mod_base = "2'-O-methyl corresponding base"
  modified_base 21: /mod_base = "5'-thio thymidine"
  modified_base 1, 2, 4, 5, 6, 8, 10, 11, 13, 16, 18, 19: /mod_base = "2'-hydroxy corresponding base"
aacagguacgacaccacagtt

SEQ ID NO: 630 - DNA, 21 bp, artificial sequence
  siRNA reactive to human Eg5
  5'-terminal nucleic acid is a nucleoside, i.e. base + sugar but lacking 5'-phosphate
  modified_base 12: /mod_base = "2'-O-methyl corresponding base"
  modified_base 21: /mod_base = "5'-thio thymidine"
  modified_base 1, 2, 3, 4, 5, 6, 7, 8, 9, 10, 11, 13, 14, 15, 16, 17, 18, 19: /mod_base = "2'-hydroxy corresponding base"
cuguggugucguaccuguutt

SEQ ID NO: 631 - DNA, 21 bp, artificial sequence
  siRNA reactive to human Eg5
  5'-terminal nucleic acid is a nucleoside, i.e. base + sugar but lacking 5'-phosphate
  modified_base 3, 4, 5, 6, 9, 10, 12, 14, 15, 16, 17, 18, 19: /mod_base = "2'-O-methyl corresponding base"
  modified_base 21: /mod_base = "5'-thio thymidine"
  modified_base 1, 2, 7, 8, 11, 13: /mod_base = "2'-hydroxy corresponding base"
aacccuaguuguaucccuctt

SEQ ID NO: 632 - DNA, 21 bp, artificial sequence
  siRNA reactive to human Eg5
  5'-terminal nucleic acid is a nucleoside, i.e. base + sugar but lacking 5'-phosphate
  modified_base 7, 9, 13: /mod_base = "2'-O-methyl corresponding base"
  modified_base 21: /mod_base = "5'-thio thymidine"
  modified_base 1, 2, 3, 4, 5, 6, 8, 10, 11, 12, 14, 15, 16, 17, 18, 19: /mod_base = "2'-hydroxy corresponding base"
gagggauacaacuaggguutt

SEQ ID NO: 633 - DNA, 21 bp, artificial sequence
  siRNA reactive to human Eg5
  5'-terminal nucleic acid is a nucleoside, i.e. base + sugar but lacking 5'-phosphate
  modified_base 2, 4, 8, 11, 15, 18: /mod_base = "2'-O-methyl corresponding base"
  modified_base 21: /mod_base = "5'-thio thymidine"
  modified_base 1, 3, 5, 6, 7, 9, 10, 12, 13, 14, 16, 17, 19: /mod_base = "2'-hydroxy corresponding base"
gcauaagcgauggauaauatt

SEQ ID NO: 634 - DNA, 21 bp, artificial sequence
  siRNA reactive to human Eg5
  5'-terminal nucleic acid is a nucleoside, i.e. base + sugar but lacking 5'-phosphate
  modified_base 1, 4, 8, 15: /mod_base = "2'-O-methyl corresponding base"
  modified_base 21: /mod_base = "5'-thio thymidine"
  modified_base 2, 3, 5, 6, 7, 9, 10, 11, 12, 13, 14, 16, 17, 18, 19: /mod_base = "2'-hydroxy corresponding base"
uauuauccaucgcuuaugctt

SEQ ID NO: 635 - DNA, 21 bp, artificial sequence
  siRNA reactive to human Eg5
  5'-terminal nucleic acid is a nucleoside, i.e. base + sugar but lacking 5'-phosphate
  modified_base 4, 7, 11, 14, 16, 17, 18: /mod_base = "2'-O-methyl corresponding base"
  modified_base 21: /mod_base = "5'-thio thymidine"
  modified_base 1, 2, 3, 5, 6, 8, 9, 10, 12, 13, 15, 19: /mod_base = "2'-hydroxy corresponding base"
aagcgauggauaauaccuatt

SEQ ID NO: 636 - DNA, 21 bp, artificial sequence
  siRNA reactive to human Eg5
  5'-terminal nucleic acid is a nucleoside, i.e. base + sugar but lacking 5'-phosphate
  modified_base 1, 5, 8, 12: /mod_base = "2'-O-methyl corresponding base"
  modified_base 21: /mod_base = "5'-thio thymidine"
  modified_base 2, 3, 4, 6, 7, 9, 10, 11, 13, 14, 15, 16, 17, 18, 19: /mod_base = "2'-hydroxy corresponding base"
uagguauuauccaucgcuutt

SEQ ID NO: 637 - DNA, 21 bp, artificial sequence
  siRNA reactive to human Eg5
  5'-terminal nucleic acid is a nucleoside, i.e. base + sugar but lacking 5'-phosphate
  modified_base 1, 4, 5, 6, 7, 9, 11: /mod_base = "2'-O-methyl corresponding base"
  modified_base 21: /mod_base = "5'-thio thymidine"
  modified_base 2, 3, 8, 10, 12, 13, 14, 15, 16, 17, 18, 19: /mod_base = "2'-hydroxy corresponding base"
ugauccuguacgaaaagaatt

SEQ ID NO: 638 - DNA, 21 bp, artificial sequence
  siRNA reactive to human Eg5
  5'-terminal nucleic acid is a nucleoside, i.e. base + sugar but lacking 5'-phosphate
  modified_base 10, 12, 18: /mod_base = "2'-O-methyl corresponding base"
  modified_base 21: /mod_base = "5'-thio thymidine"
  modified_base 1, 2, 3, 4, 5, 6, 7, 8, 9, 11, 13, 14, 15, 16, 17, 19: /mod_base = "2'-hydroxy corresponding base"
uucuuuucguacaggaucatt

SEQ ID NO: 639 - DNA, 21 bp, artificial sequence
  siRNA reactive to human Eg5
  5'-terminal nucleic acid is a nucleoside, i.e. base + sugar but lacking 5'-phosphate
  modified_base 5, 7, 8, 11, 12, 14, 15, 16, 17: /mod_base = "2'-O-methyl corresponding base"
  modified_base 21: /mod_base = "5'-thio thymidine"
  modified_base 1, 2, 3, 4, 6, 9, 10, 13, 18, 19: /mod_base = "2'-hydroxy corresponding base"
aaaacauuggccguucuggtt

SEQ ID NO: 640 - DNA, 21 bp, artificial sequence
  siRNA reactive to human Eg5
  5'-terminal nucleic acid is a nucleoside, i.e. base + sugar but lacking 5'-phosphate
  modified_base 2, 11: /mod_base = "2'-O-methyl corresponding base"
  modified_base 21: /mod_base = "5'-thio thymidine"
  modified_base 1, 3, 4, 5, 6, 7, 8, 9, 10, 12, 13, 14, 15, 16, 17, 18, 19: /mod_base = "2'-hydroxy corresponding base"
ccagaacggccaauguuuutt

SEQ ID NO: 641 - DNA, 21 bp, artificial sequence
  siRNA reactive to human Eg5
  5'-terminal nucleic acid is a nucleoside, i.e. base + sugar but lacking 5'-phosphate
  modified_base 1, 2, 3, 10, 12, 14: /mod_base = "2'-O-methyl corresponding base"
  modified_base 21: /mod_base = "5'-thio thymidine"
  modified_base 4, 5, 6, 7, 8, 9, 11, 13, 15, 16, 17, 18, 19: /mod_base = "2'-hydroxy corresponding base"
cuuggagggcguacaagaatt

SEQ ID NO: 642 - DNA, 21 bp, artificial sequence
  siRNA reactive to human Eg5
  5'-terminal nucleic acid is a nucleoside, i.e. base + sugar but lacking 5'-phosphate
  modified_base 7, 16: /mod_base = "2'-O-methyl corresponding base"
  modified_base 21: /mod_base = "5'-thio thymidine"
  modified_base 1, 2, 3, 4, 5, 6, 8, 9, 10, 11, 12, 13, 14, 15, 17, 18, 19: /mod_base = "2'-hydroxy corresponding base"
uucuuguacgcccuccaagtt

SEQ ID NO: 643 - DNA, 21 bp, artificial sequence
  siRNA reactive to human Eg5
  5'-terminal nucleic acid is a nucleoside, i.e. base + sugar but lacking 5'-phosphate
  modified_base 3, 5, 7, 13, 15, 16, 17, 19: /mod_base = "2'-O-methyl corresponding base"
  modified_base 21: /mod_base = "5'-thio thymidine"
  modified_base 1, 2, 4, 6, 8, 9, 10, 11, 12, 14, 18: /mod_base = "2'-hydroxy corresponding base"
ggcguacaagaacaucuautt

SEQ ID NO: 644 - DNA, 21 bp, artificial sequence
  siRNA reactive to human Eg5
  5'-terminal nucleic acid is a nucleoside, i.e. base + sugar but lacking 5'-phosphate
  modified_base 2, 14: /mod_base = "2'-O-methyl corresponding base"
  modified_base 21: /mod_base = "5'-thio thymidine"
  modified_base 1, 3, 4, 5, 6, 7, 8, 9, 10, 11, 12, 13, 15, 16, 17, 18, 19: /mod_base = "2'-hydroxy corresponding base"
auagauguucuuguacgcctt

SEQ ID NO: 645 - DNA, 21 bp, artificial sequence
  siRNA reactive to human Eg5
  5'-terminal nucleic acid is a nucleoside, i.e. base + sugar but lacking 5'-phosphate
  modified_base 2, 3, 4, 5, 9, 11, 13, 14, 19: /mod_base = "2'-O-methyl corresponding base"
  modified_base 21: /mod_base = "5'-thio thymidine"
  modified_base 1, 6, 7, 8, 10, 12, 15, 16, 17, 18: /mod_base = "2'-hydroxy corresponding base"
acucugaguacauuggaautt

SEQ ID NO: 646 - DNA, 21 bp, artificial sequence
  siRNA reactive to human Eg5
  5'-terminal nucleic acid is a nucleoside, i.e. base + sugar but lacking 5'-phosphate
  modified_base 5, 10, 14: /mod_base = "2'-O-methyl corresponding base"
  modified_base 21: /mod_base = "5'-thio thymidine"
  modified_base 1, 2, 3, 4, 6, 7, 8, 9, 11, 12, 13, 15, 16, 17, 18, 19: /mod_base = "2'-hydroxy corresponding base"
auuccaauguacucagagutt

SEQ ID NO: 647 - DNA, 21 bp, artificial sequence
  siRNA reactive to human Eg5
  5'-terminal nucleic acid is a nucleoside, i.e. base + sugar but lacking 5'-phosphate
  modified_base 1, 2, 4, 5, 12, 14, 16: /mod_base = "2'-O-methyl corresponding base"
  modified_base 21: /mod_base = "5'-thio thymidine"
  modified_base 3, 6, 7, 8, 9, 10, 11, 13, 15, 17, 18, 19: /mod_base = "2'-hydroxy corresponding base"
uuauuaaggaguauacggatt

SEQ ID NO: 648 - DNA, 21 bp, artificial sequence
  siRNA reactive to human Eg5
  5'-terminal nucleic acid is a nucleoside, i.e. base + sugar but lacking 5'-phosphate
  modified_base 5, 7, 14, 17: /mod_base = "2'-O-methyl corresponding base"
  modified_base 21: /mod_base = "5'-thio thymidine"
  modified_base 1, 2, 3, 4, 6, 8, 9, 10, 11, 12, 13, 15, 16, 18, 19: /mod_base = "2'-hydroxy corresponding base"
uccguauacuccuuaauaatt

SEQ ID NO: 649 - DNA, 21 bp, artificial sequence
  siRNA reactive to human Eg5
  5'-terminal nucleic acid is a nucleoside, i.e. base + sugar but lacking 5'-phosphate
  modified_base 1, 8, 10, 12: /mod_base = "2'-O-methyl corresponding base"
  modified_base 21: /mod_base = "5'-thio thymidine"
  modified_base 2, 3, 4, 5, 6, 7, 9, 11, 13, 14, 15, 16, 17, 18, 19: /mod_base = "2'-hydroxy corresponding base"
uaaggaguauacggaggagtt

SEQ ID NO: 650 - DNA, 21 bp, artificial sequence
  siRNA reactive to human Eg5
  5'-terminal nucleic acid is a nucleoside, i.e. base + sugar but lacking 5'-phosphate
  modified_base 9, 11, 18: /mod_base = "2'-O-methyl corresponding base"
  modified_base 21: /mod_base = "5'-thio thymidine"
  modified_base 1, 2, 3, 4, 5, 6, 7, 8, 10, 12, 13, 14, 15, 16, 17, 19: /mod_base = "2'-hydroxy corresponding base"
cuccuccguauacuccuuatt

SEQ ID NO: 651 - DNA, 21 bp, artificial sequence
  siRNA reactive to human Eg5
  5'-terminal nucleic acid is a nucleoside, i.e. base + sugar but lacking 5'-phosphate
  modified_base 4, 5, 8, 11, 12, 15, 16: /mod_base = "2'-O-methyl corresponding base"
  modified_base 21: /mod_base = "5'-thio thymidine"
  modified_base 1, 2, 3, 6, 7, 9, 10, 13, 14, 17, 18, 19: /mod_base = "2'-hydroxy corresponding base"
aaaucaauagucaacuaaatt

SEQ ID NO: 652 - DNA, 21 bp, artificial sequence
  siRNA reactive to human Eg5
  5'-terminal nucleic acid is a nucleoside, i.e. base + sugar but lacking 5'-phosphate
  modified_base 3, 11: /mod_base = "2'-O-methyl corresponding base"
  modified_base 21: /mod_base = "5'-thio thymidine"
  modified_base 1, 2, 4, 5, 6, 7, 8, 9, 10, 12, 13, 14, 15, 16, 17, 18, 19: /mod_base = "2'-hydroxy corresponding base"
uuuaguugacuauugauuutt

SEQ ID NO: 653 - DNA, 21 bp, artificial sequence
  siRNA reactive to human Eg5
  5'-terminal nucleic acid is a nucleoside, i.e. base + sugar but lacking 5'-phosphate
  modified_base 3, 4, 7, 10, 11, 14, 15: /mod_base = "2'-O-methyl corresponding base"
  modified_base 21: /mod_base = "5'-thio thymidine"
  modified_base 1, 2, 5, 6, 8, 9, 12, 13, 16, 17, 18, 19: /mod_base = "2'-hydroxy corresponding base"
aaucaauagucaacuaaagtt

SEQ ID NO: 654 - DNA, 21 bp, artificial sequence
  siRNA reactive to human Eg5
  5'-terminal nucleic acid is a nucleoside, i.e. base + sugar but lacking 5'-phosphate
  modified_base 4, 12: /mod_base = "2'-O-methyl corresponding base"
  modified_base 21: /mod_base = "5'-thio thymidine"
  modified_base 1, 2, 3, 5, 6, 7, 8, 9, 10, 11, 13, 14, 15, 16, 17, 18, 19: /mod_base = "2'-hydroxy corresponding base"
cuuuaguugacuauugauutt

SEQ ID NO: 655 - DNA, 21 bp, artificial sequence
  siRNA reactive to human Eg5
  5'-terminal nucleic acid is a nucleoside, i.e. base + sugar but lacking 5'-phosphate
  modified_base 1, 2, 3, 4, 5, 8, 10, 12, 13, 15, 17: /mod_base = "2'-O-methyl corresponding base"
  modified_base 21: /mod_base = "5'-thio thymidine"
  modified_base 6, 7, 9, 11, 14, 16, 18, 19: /mod_base = "2'-hydroxy corresponding base"
uucucaguauacuguguaatt

SEQ ID NO: 656 - DNA, 21 bp, artificial sequence
  siRNA reactive to human Eg5
  5'-terminal nucleic acid is a nucleoside, i.e. base + sugar but lacking 5'-phosphate
  modified_base 2, 4, 6, 9, 11: /mod_base = "2'-O-methyl corresponding base"
  modified_base 21: /mod_base = "5'-thio thymidine"
  modified_base 1, 3, 5, 7, 8, 10, 12, 13, 14, 15, 16, 17, 18, 19: /mod_base = "2'-hydroxy corresponding base"
uuacacaguauacugagaatt

SEQ ID NO: 657 - DNA, 21 bp, artificial sequence
  siRNA reactive to human Eg5
  5'-terminal nucleic acid is a nucleoside, i.e. base + sugar but lacking 5'-phosphate
  modified_base 1, 3, 8, 10, 11, 12, 13, 16: /mod_base = "2'-O-methyl corresponding base"
  modified_base 21: /mod_base = "5'-thio thymidine"
  modified_base 2, 4, 5, 6, 7, 9, 14, 15, 17, 18, 19: /mod_base = "2'-hydroxy corresponding base"
ugugaaacacucugauaaatt

SEQ ID NO: 658 - DNA, 21 bp, artificial sequence
  siRNA reactive to human Eg5
  5'-terminal nucleic acid is a nucleoside, i.e. base + sugar but lacking 5'-phosphate
  modified_base 3, 6, 16, 18: /mod_base = "2'-O-methyl corresponding base"
  modified_base 21: /mod_base = "5'-thio thymidine"
  modified_base 1, 2, 4, 5, 7, 8, 9, 10, 11, 12, 13, 14, 15, 17, 19: /mod_base = "2'-hydroxy corresponding base"
uuuaucagaguguuucacatt

SEQ ID NO: 659 - DNA, 21 bp, artificial sequence
  siRNA reactive to human Eg5
  5'-terminal nucleic acid is a nucleoside, i.e. base + sugar but lacking 5'-phosphate
  modified_base 4, 6, 10, 11, 12, 13, 14, 18: /mod_base = "2'-O-methyl corresponding base"
  modified_base 21: /mod_base = "5'-thio thymidine"
  modified_base 1, 2, 3, 5, 7, 8, 9, 15, 16, 17, 19: /mod_base = "2'-hydroxy corresponding base"
agaugugaaucucugaacatt

SEQ ID NO: 660 - DNA, 21 bp, artificial sequence
  siRNA reactive to human Eg5
  5'-terminal nucleic acid is a nucleoside, i.e. base + sugar but lacking 5'-phosphate
  modified_base 5, 13, 15: /mod_base = "2'-O-methyl corresponding base"
  modified_base 21: /mod_base = "5'-thio thymidine"
  modified_base 1, 2, 3, 4, 6, 7, 8, 9, 10, 11, 12, 14, 16, 17, 18, 19: /mod_base = "2'-hydroxy corresponding base"
uguucagagauucacaucutt

SEQ ID NO: 661 - DNA, 21 bp, artificial sequence
  siRNA reactive to human Eg5
  5'-terminal nucleic acid is a nucleoside, i.e. base + sugar but lacking 5'-phosphate
  modified_base 4, 5, 7, 11, 12, 15, 17, 18: /mod_base = "2'-O-methyl corresponding base"
  modified_base 21: /mod_base = "5'-thio thymidine"
  modified_base 1, 2, 3, 6, 8, 9, 10, 13, 14, 16, 19: /mod_base = "2'-hydroxy corresponding base"
agguuguaagccaauguugtt

SEQ ID NO: 662 - DNA, 21 bp, artificial sequence
  siRNA reactive to human Eg5
  5'-terminal nucleic acid is a nucleoside, i.e. base + sugar but lacking 5'-phosphate
  modified_base 1, 4, 12, 14: /mod_base = "2'-O-methyl corresponding base"
  modified_base 21: /mod_base = "5'-thio thymidine"
  modified_base 2, 3, 5, 6, 7, 8, 9, 10, 11, 13, 15, 16, 17, 18, 19: /mod_base = "2'-hydroxy corresponding base"
caacauuggcuuacaaccutt

SEQ ID NO: 663 - DNA, 21 bp, artificial sequence
  siRNA reactive to human Eg5
  5'-terminal nucleic acid is a nucleoside, i.e. base + sugar but lacking 5'-phosphate
  modified_base 1, 8, 9, 13, 17, 19: /mod_base = "2'-O-methyl corresponding base"
  modified_base 21: /mod_base = "5'-thio thymidine"
  modified_base 2, 3, 4, 5, 6, 7, 10, 11, 12, 14, 15, 16, 18: /mod_base = "2'-hydroxy corresponding base"
ugagaaaucagauggacgutt

SEQ ID NO: 664 - DNA, 21 bp, artificial sequence
  siRNA reactive to human Eg5
  5'-terminal nucleic acid is a nucleoside, i.e. base + sugar but lacking 5'-phosphate
  modified_base 6, 18: /mod_base = "2'-O-methyl corresponding base"
  modified_base 21: /mod_base = "5'-thio thymidine"
  modified_base 1, 2, 3, 4, 5, 7, 8, 9, 10, 11, 12, 13, 14, 15, 16, 17, 19: /mod_base = "2'-hydroxy corresponding base"
acguccaucugauuucucatt

SEQ ID NO: 665 - DNA, 21 bp, artificial sequence
  siRNA reactive to human Eg5
  5'-terminal nucleic acid is a nucleoside, i.e. base + sugar but lacking 5'-phosphate
  modified_base 6, 7, 11, 15, 17: /mod_base = "2'-O-methyl corresponding base"
  modified_base 21: /mod_base = "5'-thio thymidine"
  modified_base 1, 2, 3, 4, 5, 8, 9, 10, 12, 13, 14, 16, 18, 19: /mod_base = "2'-hydroxy corresponding base"
agaaaucagauggacguaatt

SEQ ID NO: 666 - DNA, 21 bp, artificial sequence
  siRNA reactive to human Eg5
  5'-terminal nucleic acid is a nucleoside, i.e. base + sugar but lacking 5'-phosphate
  modified_base 2, 8: /mod_base = "2'-O-methyl corresponding base"
  modified_base 21: /mod_base = "5'-thio thymidine"
  modified_base 1, 3, 4, 5, 6, 7, 9, 10, 11, 12, 13, 14, 15, 16, 17, 18, 19: /mod_base = "2'-hydroxy corresponding base"
uuacguccaucugauuucutt

SEQ ID NO: 667 - DNA, 21 bp, artificial sequence
  siRNA reactive to human Eg5
  5'-terminal nucleic acid is a nucleoside, i.e. base + sugar but lacking 5'-phosphate
  modified_base 2, 4, 5, 6, 7, 10, 14, 16, 19: /mod_base = "2'-O-methyl corresponding base"
  modified_base 21: /mod_base = "5'-thio thymidine"
  modified_base 1, 3, 8, 9, 11, 12, 13, 15, 17, 18: /mod_base = "2'-hydroxy corresponding base"
auaucccaacagguacgactt

SEQ ID NO: 668 - DNA, 21 bp, artificial sequence
  siRNA reactive to human Eg5
  5'-terminal nucleic acid is a nucleoside, i.e. base + sugar but lacking 5'-phosphate
  modified_base 5, 17: /mod_base = "2'-O-methyl corresponding base"
  modified_base 21: /mod_base = "5'-thio thymidine"
  modified_base 1, 2, 3, 4, 6, 7, 8, 9, 10, 11, 12, 13, 14, 15, 16, 18, 19: /mod_base = "2'-hydroxy corresponding base"
gucguaccuguugggauautt

SEQ ID NO: 669 - DNA, 21 bp, artificial sequence
  siRNA reactive to human Eg5
  5'-terminal nucleic acid is a nucleoside, i.e. base + sugar but lacking 5'-phosphate
  modified_base 1, 2, 3, 6, 10, 12, 15, 17, 18: /mod_base = "2'-O-methyl corresponding base"
  modified_base 21: /mod_base = "5'-thio thymidine"
  modified_base 4, 5, 7, 8, 9, 11, 13, 14, 16, 19: /mod_base = "2'-hydroxy corresponding base"
cccaacagguacgacaccatt

SEQ ID NO: 670 - DNA, 21 bp, artificial sequence
  siRNA reactive to human Eg5
  5'-terminal nucleic acid is a nucleoside, i.e. base + sugar but lacking 5'-phosphate
  modified_base 9: /mod_base = "2'-O-methyl corresponding base"
  modified_base 21: /mod_base = "5'-thio thymidine"
  modified_base 1, 2, 3, 4, 5, 6, 7, 8, 10, 11, 12, 13, 14, 15, 16, 17, 18, 19: /mod_base = "2'-hydroxy corresponding base"
uggugucguaccuguugggtt

SEQ ID NO: 671 - DNA, 21 bp, artificial sequence
  siRNA reactive to human Eg5
  5'-terminal nucleic acid is a nucleoside, i.e. base + sugar but lacking 5'-phosphate
  modified_base 3, 5, 7, 8, 15, 16, 17, 18, 19: /mod_base = "2'-O-methyl corresponding base"
  modified_base 21: /mod_base = "5'-thio thymidine"
  modified_base 1, 2, 4, 6, 9, 10, 11, 12, 13, 14: /mod_base = "2'-hydroxy corresponding base"
aguauacugaagaaccucutt

SEQ ID NO: 672 - DNA, 21 bp, artificial sequence
  siRNA reactive to human Eg5
  5'-terminal nucleic acid is a nucleoside, i.e. base + sugar but lacking 5'-phosphate
  modified_base 11, 14, 16: /mod_base = "2'-O-methyl corresponding base"
  modified_base 21: /mod_base = "5'-thio thymidine"
  modified_base 1, 2, 3, 4, 5, 6, 7, 8, 9, 10, 12, 13, 15, 17, 18, 19: /mod_base = "2'-hydroxy corresponding base"
agagguucuucaguauacutt

SEQ ID NO: 673 - DNA, 21 bp, artificial sequence
  siRNA reactive to human Eg5
  5'-terminal nucleic acid is a nucleoside, i.e. base + sugar but lacking 5'-phosphate
  modified_base 2, 4, 6, 8, 9, 12, 13, 17, 19: /mod_base = "2'-O-methyl corresponding base"
  modified_base 21: /mod_base = "5'-thio thymidine"
  modified_base 1, 3, 5, 7, 10, 11, 14, 15, 16, 18: /mod_base = "2'-hydroxy corresponding base"
auauauaucagccgggcgctt

SEQ ID NO: 674 - DNA, 21 bp, artificial sequence
  siRNA reactive to human Eg5
  5'-terminal nucleic acid is a nucleoside, i.e. base + sugar but lacking 5'-phosphate
  modified_base 13, 15, 17: /mod_base = "2'-O-methyl corresponding base"
  modified_base 21: /mod_base = "5'-thio thymidine"
  modified_base 1, 2, 3, 4, 5, 6, 7, 8, 9, 10, 11, 12, 14, 16, 18, 19: /mod_base = "2'-hydroxy corresponding base"
gcgcccggcugauauauautt

SEQ ID NO: 675 - DNA, 21 bp, artificial sequence
  siRNA reactive to human Eg5
  5'-terminal nucleic acid is a nucleoside, i.e. base + sugar but lacking 5'-phosphate
  modified_base 3, 4, 5, 8, 9, 10, 11, 14, 15, 17, 19: /mod_base = "2'-O-methyl corresponding base"
  modified_base 21: /mod_base = "5'-thio thymidine"
  modified_base 1, 2, 6, 7, 12, 13, 16, 18: /mod_base = "2'-hydroxy corresponding base"
aaucuaacccuaguuguautt

SEQ ID NO: 676 - DNA, 21 bp, artificial sequence
  siRNA reactive to human Eg5
  5'-terminal nucleic acid is a nucleoside, i.e. base + sugar but lacking 5'-phosphate
  modified_base 2, 4, 8, 14: /mod_base = "2'-O-methyl corresponding base"
  modified_base 21: /mod_base = "5'-thio thymidine"
  modified_base 1, 3, 5, 6, 7, 9, 10, 11, 12, 13, 15, 16, 17, 18, 19: /mod_base = "2'-hydroxy corresponding base"
auacaacuaggguuagauutt

SEQ ID NO: 677 - DNA, 21 bp, artificial sequence
  siRNA reactive to human Eg5
  5'-terminal nucleic acid is a nucleoside, i.e. base + sugar but lacking 5'-phosphate
  modified_base 1, 2, 5, 6, 7, 8, 11, 12, 14, 16, 17, 18, 19: /mod_base = "2'-O-methyl corresponding base"
  modified_base 21: /mod_base = "5'-thio thymidine"
  modified_base 3, 4, 9, 10, 13, 15: /mod_base = "2'-hydroxy corresponding base"
cuaacccuaguuguauccctt

SEQ ID NO: 678 - DNA, 21 bp, artificial sequence
  siRNA reactive to human Eg5
  5'-terminal nucleic acid is a nucleoside, i.e. base + sugar but lacking 5'-phosphate
  modified_base 5, 7, 11, 17: /mod_base = "2'-O-methyl corresponding base"
  modified_base 21: /mod_base = "5'-thio thymidine"
  modified_base 1, 2, 3, 4, 6, 8, 9, 10, 12, 13, 14, 15, 16, 18, 19: /mod_base = "2'-hydroxy corresponding base"
gggauacaacuaggguuagtt

SEQ ID NO: 679 - DNA, 21 bp, artificial sequence
  siRNA reactive to human Eg5
  5'-terminal nucleic acid is a nucleoside, i.e. base + sugar but lacking 5'-phosphate
  modified_base 1, 2, 5, 6, 8, 10, 11, 12, 13, 14, 15, 16, 17, 18, 19: /mod_base = "2'-O-methyl corresponding base"
  modified_base 21: /mod_base = "5'-thio thymidine"
  modified_base 3, 4, 7, 9: /mod_base = "2'-hydroxy corresponding base"
cuaguuguaucccuccuuutt

SEQ ID NO: 680 - DNA, 21 bp, artificial sequence
  siRNA reactive to human Eg5
  5'-terminal nucleic acid is a nucleoside, i.e. base + sugar but lacking 5'-phosphate
  modified_base 11, 13, 17: /mod_base = "2'-O-methyl corresponding base"
  modified_base 21: /mod_base = "5'-thio thymidine"
  modified_base 1, 2, 3, 4, 5, 6, 7, 8, 9, 10, 12, 14, 15, 16, 18, 19: /mod_base = "2'-hydroxy corresponding base"
aaaggagggauacaacuagtt

SEQ ID NO: 681 - DNA, 21 bp, artificial sequence
  siRNA reactive to human Eg5
  5'-terminal nucleic acid is a nucleoside, i.e. base + sugar but lacking 5'-phosphate
  modified_base 4, 6, 7, 8, 11, 12, 15, 18, 19: /mod_base = "2'-O-methyl corresponding base"
  modified_base 21: /mod_base = "5'-thio thymidine"
  modified_base 1, 2, 3, 5, 9, 10, 13, 14, 16, 17: /mod_base = "2'-hydroxy corresponding base"
agacaucugacuaauggcutt

SEQ ID NO: 682 - DNA, 21 bp, artificial sequence
  siRNA reactive to human Eg5
  5'-terminal nucleic acid is a nucleoside, i.e. base + sugar but lacking 5'-phosphate
  modified_base 4, 7, 11: /mod_base = "2'-O-methyl corresponding base"
  modified_base 21: /mod_base = "5'-thio thymidine"
  modified_base 1, 2, 3, 5, 6, 8, 9, 10, 12, 13, 14, 15, 16, 17, 18, 19: /mod_base = "2'-hydroxy corresponding base"
agccauuagucagaugucutt

SEQ ID NO: 683 - DNA, 21 bp, artificial sequence
  siRNA reactive to human Eg5
  5'-terminal nucleic acid is a nucleoside, i.e. base + sugar but lacking 5'-phosphate
  modified_base 5, 6, 7, 9, 12, 15, 16, 17: /mod_base = "2'-O-methyl corresponding base"
  modified_base 21: /mod_base = "5'-thio thymidine"
  modified_base 1, 2, 3, 4, 8, 10, 11, 13, 14, 18, 19: /mod_base = "2'-hydroxy corresponding base"
gaagcucacaaugauuuaatt

SEQ ID NO: 684 - DNA, 21 bp, artificial sequence
  siRNA reactive to human Eg5
  5'-terminal nucleic acid is a nucleoside, i.e. base + sugar but lacking 5'-phosphate
  modified_base 2, 7: /mod_base = "2'-O-methyl corresponding base"
  modified_base 21: /mod_base = "5'-thio thymidine"
  modified_base 1, 3, 4, 5, 6, 8, 9, 10, 11, 12, 13, 14, 15, 16, 17, 18, 19: /mod_base = "2'-hydroxy corresponding base"
uuaaaucauugugagcuuctt

SEQ ID NO: 685 - DNA, 21 bp, artificial sequence
  siRNA reactive to human Eg5
  5'-terminal nucleic acid is a nucleoside, i.e. base + sugar but lacking 5'-phosphate
  modified_base 2, 4, 6, 8, 9, 10, 11, 12, 13, 14, 15, 16, 17: /mod_base = "2'-O-methyl corresponding base"
  modified_base 21: /mod_base = "5'-thio thymidine"
  modified_base 1, 3, 5, 7, 18, 19: /mod_base = "2'-hydroxy corresponding base"
acauguaucuuuuucucgatt

SEQ ID NO: 686 - DNA, 21 bp, artificial sequence
  siRNA reactive to human Eg5
  5'-terminal nucleic acid is a nucleoside, i.e. base + sugar but lacking 5'-phosphate
  modified_base 13, 15: /mod_base = "2'-O-methyl corresponding base"
  modified_base 21: /mod_base = "5'-thio thymidine"
  modified_base 1, 2, 3, 4, 5, 6, 7, 8, 9, 10, 11, 12, 14, 16, 17, 18, 19: /mod_base = "2'-hydroxy corresponding base"
ucgagaaaaagauacaugutt

SEQ ID NO: 687 - DNA, 21 bp, artificial sequence
  siRNA reactive to human Eg5
  5'-terminal nucleic acid is a nucleoside, i.e. base + sugar but lacking 5'-phosphate
  modified_base 1, 2, 5, 6, 7, 11, 12, 13, 14, 17, 18, 19: /mod_base = "2'-O-methyl corresponding base"
  modified_base 21: /mod_base = "5'-thio thymidine"
  modified_base 3, 4, 8, 9, 10, 15, 16: /mod_base = "2'-hydroxy corresponding base"
ucgauucaaaucuuaaccctt

SEQ ID NO: 688 - DNA, 21 bp, artificial sequence
  siRNA reactive to human Eg5
  5'-terminal nucleic acid is a nucleoside, i.e. base + sugar but lacking 5'-phosphate
  modified_base 5: /mod_base = "2'-O-methyl corresponding base"
  modified_base 21: /mod_base = "5'-thio thymidine"
  modified_base 1, 2, 3, 4, 6, 7, 8, 9, 10, 11, 12, 13, 14, 15, 16, 17, 18, 19: /mod_base = "2'-hydroxy corresponding base"
ggguuaagauuugaaucgatt

SEQ ID NO: 689 - DNA, 21 bp, artificial sequence
  siRNA reactive to human Eg5
  5'-terminal nucleic acid is a nucleoside, i.e. base + sugar but lacking 5'-phosphate
  modified_base 1, 2, 3, 4, 7, 8, 9, 10, 11, 16, 17, 18, 19: /mod_base = "2'-O-methyl corresponding base"
  modified_base 21: /mod_base = "5'-thio thymidine"
  modified_base 5, 6, 12, 13, 14, 15: /mod_base = "2'-hydroxy corresponding base"
ucuuaacccuuaggacucutt

SEQ ID NO: 690 - DNA, 21 bp, artificial sequence
  siRNA reactive to human Eg5
  5'-terminal nucleic acid is a nucleoside, i.e. base + sugar but lacking 5'-phosphate
  modified_base 8, 15: /mod_base = "2'-O-methyl corresponding base"
  modified_base 21: /mod_base = "5'-thio thymidine"
  modified_base 1, 2, 3, 4, 5, 6, 7, 9, 10, 11, 12, 13, 14, 16, 17, 18, 19: /mod_base = "2'-hydroxy corresponding base"
agaguccuaaggguuaagatt

SEQ ID NO: 691 - DNA, 21 bp, artificial sequence
  siRNA reactive to human Eg5
  5'-terminal nucleic acid is a nucleoside, i.e. base + sugar but lacking 5'-phosphate
  modified_base 2, 3, 4, 6, 9, 13, 14, 15, 18: /mod_base = "2'-O-methyl corresponding base"
  modified_base 21: /mod_base = "5'-thio thymidine"
  modified_base 1, 5, 7, 8, 10, 11, 12, 16, 17, 19: /mod_base = "2'-hydroxy corresponding base"
gcucacgaugaguuuagugtt

SEQ ID NO: 692 - DNA, 21 bp, artificial sequence
  siRNA reactive to human Eg5
  5'-terminal nucleic acid is a nucleoside, i.e. base + sugar but lacking 5'-phosphate
  modified_base 1, 4, 10: /mod_base = "2'-O-methyl corresponding base"
  modified_base 21: /mod_base = "5'-thio thymidine"
  modified_base 2, 3, 5, 6, 7, 8, 9, 11, 12, 13, 14, 15, 16, 17, 18, 19: /mod_base = "2'-hydroxy corresponding base"
cacuaaacucaucgugagctt

SEQ ID NO: 693 - DNA, 21 bp, artificial sequence
  siRNA reactive to human Eg5
  5'-terminal nucleic acid is a nucleoside, i.e. base + sugar but lacking 5'-phosphate
  modified_base 1, 3, 7, 10, 14, 17, 19: /mod_base = "2'-O-methyl corresponding base"
  modified_base 21: /mod_base = "5'-thio thymidine"
  modified_base 2, 4, 5, 6, 8, 9, 11, 12, 13, 15, 16, 18: /mod_base = "2'-hydroxy corresponding base"
cauaagcgauggauaauactt

SEQ ID NO: 694 - DNA, 21 bp, artificial sequence
  siRNA reactive to human Eg5
  5'-terminal nucleic acid is a nucleoside, i.e. base + sugar but lacking 5'-phosphate
  modified_base 2, 5, 9, 16: /mod_base = "2'-O-methyl corresponding base"
  modified_base 21: /mod_base = "5'-thio thymidine"
  modified_base 1, 3, 4, 6, 7, 8, 10, 11, 12, 13, 14, 15, 17, 18, 19: /mod_base = "2'-hydroxy corresponding base"
guauuauccaucgcuuaugtt

SEQ ID NO: 695 - DNA, 21 bp, artificial sequence
  siRNA reactive to human Eg5
  5'-terminal nucleic acid is a nucleoside, i.e. base + sugar but lacking 5'-phosphate
  modified_base 2, 6, 9, 13, 16, 18, 19: /mod_base = "2'-O-methyl corresponding base"
  modified_base 21: /mod_base = "5'-thio thymidine"
  modified_base 1, 3, 4, 5, 7, 8, 10, 11, 12, 14, 15, 17: /mod_base = "2'-hydroxy corresponding base"
auaagcgauggauaauacctt

SEQ ID NO: 696 - DNA, 21 bp, artificial sequence
  siRNA reactive to human Eg5
  5'-terminal nucleic acid is a nucleoside, i.e. base + sugar but lacking 5'-phosphate
  modified_base 3, 6, 10, 17: /mod_base = "2'-O-methyl corresponding base"
  modified_base 21: /mod_base = "5'-thio thymidine"
  modified_base 1, 2, 4, 5, 7, 8, 9, 11, 12, 13, 14, 15, 16, 18, 19: /mod_base = "2'-hydroxy corresponding base"
gguauuauccaucgcuuautt

SEQ ID NO: 697 - DNA, 21 bp, artificial sequence
  siRNA reactive to human Eg5
  5'-terminal nucleic acid is a nucleoside, i.e. base + sugar but lacking 5'-phosphate
  modified_base 1, 2, 3, 6, 10, 11, 13, 14, 15, 16, 17: /mod_base = "2'-O-methyl corresponding base"
  modified_base 21: /mod_base = "5'-thio thymidine"
  modified_base 4, 5, 7, 8, 9, 12, 18, 19: /mod_base = "2'-hydroxy corresponding base"
ccuaauaaacugcccucagtt

SEQ ID NO: 698 - DNA, 21 bp, artificial sequence
  siRNA reactive to human Eg5
  5'-terminal nucleic acid is a nucleoside, i.e. base + sugar but lacking 5'-phosphate
  modified_base 8, 13, 16: /mod_base = "2'-O-methyl corresponding base"
  modified_base 21: /mod_base = "5'-thio thymidine"
  modified_base 1, 2, 3, 4, 5, 6, 7, 9, 10, 11, 12, 14, 15, 17, 18, 19: /mod_base = "2'-hydroxy corresponding base"
cugagggcaguuuauuaggtt

SEQ ID NO: 699 - DNA, 21 bp, artificial sequence
  siRNA reactive to human Eg5
  5'-terminal nucleic acid is a nucleoside, i.e. base + sugar but lacking 5'-phosphate
  modified_base 1, 2, 9, 10, 14, 15, 16, 19: /mod_base = "2'-O-methyl corresponding base"
  modified_base 21: /mod_base = "5'-thio thymidine"
  modified_base 3, 4, 5, 6, 7, 8, 11, 12, 13, 17, 18: /mod_base = "2'-hydroxy corresponding base"
ucggaaaguugaacuuggutt

SEQ ID NO: 700 - DNA, 21 bp, artificial sequence
  siRNA reactive to human Eg5
  5'-terminal nucleic acid is a nucleoside, i.e. base + sugar but lacking 5'-phosphate
  modified_base 3, 9: /mod_base = "2'-O-methyl corresponding base"
  modified_base 21: /mod_base = "5'-thio thymidine"
  modified_base 1, 2, 4, 5, 6, 7, 8, 10, 11, 12, 13, 14, 15, 16, 17, 18, 19: /mod_base = "2'-hydroxy corresponding base"
accaaguucaacuuuccgatt

SEQ ID NO: 701 - DNA, 21 bp, artificial sequence
  siRNA reactive to human Eg5
  5'-terminal nucleic acid is a nucleoside, i.e. base + sugar but lacking 5'-phosphate
  modified_base 6, 8, 9, 12, 13, 15, 16, 17, 18: /mod_base = "2'-O-methyl corresponding base"
  modified_base 21: /mod_base = "5'-thio thymidine"
  modified_base 1, 2, 3, 4, 5, 7, 10, 11, 14, 19: /mod_base = "2'-hydroxy corresponding base"
gaaaacauuggccguucugtt

SEQ ID NO: 702 - DNA, 21 bp, artificial sequence
  siRNA reactive to human Eg5
  5'-terminal nucleic acid is a nucleoside, i.e. base + sugar but lacking 5'-phosphate
  modified_base 1, 10: /mod_base = "2'-O-methyl corresponding base"
  modified_base 21: /mod_base = "5'-thio thymidine"
  modified_base 2, 3, 4, 5, 6, 7, 8, 9, 11, 12, 13, 14, 15, 16, 17, 18, 19: /mod_base = "2'-hydroxy corresponding base"
cagaacggccaauguuuuctt

SEQ ID NO: 703 - DNA, 21 bp, artificial sequence
  siRNA reactive to human Eg5
  5'-terminal nucleic acid is a nucleoside, i.e. base + sugar but lacking 5'-phosphate
  modified_base 5, 6, 9, 10, 11, 12, 13, 14, 18, 19: /mod_base = "2'-O-methyl corresponding base"
  modified_base 21: /mod_base = "5'-thio thymidine"
  modified_base 1, 2, 3, 4, 7, 8, 15, 16, 17: /mod_base = "2'-hydroxy corresponding base"
aagacugaucuucuaaguutt

SEQ ID NO: 704 - DNA, 21 bp, artificial sequence
  siRNA reactive to human Eg5
  5'-terminal nucleic acid is a nucleoside, i.e. base + sugar but lacking 5'-phosphate
  modified_base 5, 13: /mod_base = "2'-O-methyl corresponding base"
  modified_base 21: /mod_base = "5'-thio thymidine"
  modified_base 1, 2, 3, 4, 6, 7, 8, 9, 10, 11, 12, 14, 15, 16, 17, 18, 19: /mod_base = "2'-hydroxy corresponding base"
aacuuagaagaucagucuutt

SEQ ID NO: 705 - DNA, 21 bp, artificial sequence
  siRNA reactive to human Eg5
  5'-terminal nucleic acid is a nucleoside, i.e. base + sugar but lacking 5'-phosphate
  modified_base 4, 5, 6, 8, 9, 14, 15: /mod_base = "2'-O-methyl corresponding base"
  modified_base 21: /mod_base = "5'-thio thymidine"
  modified_base 1, 2, 3, 7, 10, 11, 12, 13, 16, 17, 18, 19: /mod_base = "2'-hydroxy corresponding base"
gagcuuguuaaaaucggaatt

SEQ ID NO: 706 - DNA, 21 bp, artificial sequence
  siRNA reactive to human Eg5
  5'-terminal nucleic acid is a nucleoside, i.e. base + sugar but lacking 5'-phosphate
  modified_base 10, 13: /mod_base = "2'-O-methyl corresponding base"
  modified_base 21: /mod_base = "5'-thio thymidine"
  modified_base 1, 2, 3, 4, 5, 6, 7, 8, 9, 11, 12, 14, 15, 16, 17, 18, 19: /mod_base = "2'-hydroxy corresponding base"
uuccgauuuuaacaagcuctt

SEQ ID NO: 707 - DNA, 21 bp, artificial sequence
  siRNA reactive to human Eg5
  5'-terminal nucleic acid is a nucleoside, i.e. base + sugar but lacking 5'-phosphate
  modified_base 2, 4, 5, 8, 9, 11, 12, 13, 14, 19: /mod_base = "2'-O-methyl corresponding base"
  modified_base 21: /mod_base = "5'-thio thymidine"
  modified_base 1, 3, 6, 7, 10, 15, 16, 17, 18: /mod_base = "2'-hydroxy corresponding base"
acauuggccguucuggagctt

SEQ ID NO: 708 - DNA, 21 bp, artificial sequence
  siRNA reactive to human Eg5
  5'-terminal nucleic acid is a nucleoside, i.e. base + sugar but lacking 5'-phosphate
  modified_base 5, 14: /mod_base = "2'-O-methyl corresponding base"
  modified_base 21: /mod_base = "5'-thio thymidine"
  modified_base 1, 2, 3, 4, 6, 7, 8, 9, 10, 11, 12, 13, 15, 16, 17, 18, 19: /mod_base = "2'-hydroxy corresponding base"
gcuccagaacggccaaugutt

SEQ ID NO: 709 - DNA, 21 bp, artificial sequence
  siRNA reactive to human Eg5
  5'-terminal nucleic acid is a nucleoside, i.e. base + sugar but lacking 5'-phosphate
  modified_base 6, 8, 9, 10, 12, 15, 16, 18: /mod_base = "2'-O-methyl corresponding base"
  modified_base 21: /mod_base = "5'-thio thymidine"
  modified_base 1, 2, 3, 4, 5, 7, 11, 13, 14, 17, 19: /mod_base = "2'-hydroxy corresponding base"
aagaacaucuauaauugcatt

SEQ ID NO: 710 - DNA, 21 bp, artificial sequence
  siRNA reactive to human Eg5
  5'-terminal nucleic acid is a nucleoside, i.e. base + sugar but lacking 5'-phosphate
  modified_base 3, 7, 9: /mod_base = "2'-O-methyl corresponding base"
  modified_base 21: /mod_base = "5'-thio thymidine"
  modified_base 1, 2, 4, 5, 6, 8, 10, 11, 12, 13, 14, 15, 16, 17, 18, 19: /mod_base = "2'-hydroxy corresponding base"
ugcaauuauagauguucuutt

SEQ ID NO: 711 - DNA, 21 bp, artificial sequence
  siRNA reactive to human Eg5
  5'-terminal nucleic acid is a nucleoside, i.e. base + sugar but lacking 5'-phosphate
  modified_base 4, 6, 8, 9, 10, 12, 13, 14, 16, 18, 19: /mod_base = "2'-O-methyl corresponding base"
  modified_base 21: /mod_base = "5'-thio thymidine"
  modified_base 1, 2, 3, 5, 7, 11, 15, 17: /mod_base = "2'-hydroxy corresponding base"
aaaugugucuacucauguutt

SEQ ID NO: 712 - DNA, 21 bp, artificial sequence
  siRNA reactive to human Eg5
  5'-terminal nucleic acid is a nucleoside, i.e. base + sugar but lacking 5'-phosphate
  modified_base 3, 9, 13, 15: /mod_base = "2'-O-methyl corresponding base"
  modified_base 21: /mod_base = "5'-thio thymidine"
  modified_base 1, 2, 4, 5, 6, 7, 8, 10, 11, 12, 14, 16, 17, 18, 19: /mod_base = "2'-hydroxy corresponding base"
aacaugaguagacacauuutt

SEQ ID NO: 713 - DNA, 21 bp, artificial sequence
  siRNA reactive to human Eg5
  5'-terminal nucleic acid is a nucleoside, i.e. base + sugar but lacking 5'-phosphate
  modified_base 1, 3, 4, 5, 7, 8, 9, 11, 13, 14, 15, 16, 17, 18: /mod_base = "2'-O-methyl corresponding base"
  modified_base 21: /mod_base = "5'-thio thymidine"
  modified_base 2, 6, 10, 12, 19: /mod_base = "2'-hydroxy corresponding base"
ugucuacucauguuucucatt

SEQ ID NO: 714 - DNA, 21 bp, artificial sequence
  siRNA reactive to human Eg5
  5'-terminal nucleic acid is a nucleoside, i.e. base + sugar but lacking 5'-phosphate
  modified_base 8, 14, 18: /mod_base = "2'-O-methyl corresponding base"
  modified_base 21: /mod_base = "5'-thio thymidine"
  modified_base 1, 2, 3, 4, 5, 6, 7, 9, 10, 11, 12, 13, 15, 16, 17, 19: /mod_base = "2'-hydroxy corresponding base"
ugagaaacaugaguagacatt

SEQ ID NO: 715 - DNA, 21 bp, artificial sequence
  siRNA reactive to human Eg5
  5'-terminal nucleic acid is a nucleoside, i.e. base + sugar but lacking 5'-phosphate
  modified_base 2, 4, 6, 7, 9, 11, 14, 17, 18, 19: /mod_base = "2'-O-methyl corresponding base"
  modified_base 21: /mod_base = "5'-thio thymidine"
  modified_base 1, 3, 5, 8, 10, 12, 13, 15, 16: /mod_base = "2'-hydroxy corresponding base"
guauacuguguaacaaucutt

SEQ ID NO: 716 - DNA, 21 bp, artificial sequence
  siRNA reactive to human Eg5
  5'-terminal nucleic acid is a nucleoside, i.e. base + sugar but lacking 5'-phosphate
  modified_base 8, 10, 12, 15, 17: /mod_base = "2'-O-methyl corresponding base"
  modified_base 21: /mod_base = "5'-thio thymidine"
  modified_base 1, 2, 3, 4, 5, 6, 7, 9, 11, 13, 14, 16, 18, 19: /mod_base = "2'-hydroxy corresponding base"
agauuguuacacaguauactt

SEQ ID NO: 717 - DNA, 21 bp, artificial sequence
  siRNA reactive to human Eg5
  5'-terminal nucleic acid is a nucleoside, i.e. base + sugar but lacking 5'-phosphate
  modified_base 1, 3, 5, 6, 8, 10, 13, 16, 17, 18: /mod_base = "2'-O-methyl corresponding base"
  modified_base 21: /mod_base = "5'-thio thymidine"
  modified_base 2, 4, 7, 9, 11, 12, 14, 15, 19: /mod_base = "2'-hydroxy corresponding base"
uauacuguguaacaaucuatt

SEQ ID NO: 718 - DNA, 21 bp, artificial sequence
  siRNA reactive to human Eg5
  5'-terminal nucleic acid is a nucleoside, i.e. base + sugar but lacking 5'-phosphate
  modified_base 1, 9, 11, 13, 16, 18: /mod_base = "2'-O-methyl corresponding base"
  modified_base 21: /mod_base = "5'-thio thymidine"
  modified_base 2, 3, 4, 5, 6, 7, 8, 10, 12, 14, 15, 17, 19: /mod_base = "2'-hydroxy corresponding base"
uagauuguuacacaguauatt

SEQ ID NO: 719 - DNA, 21 bp, artificial sequence
  siRNA reactive to human Eg5
  5'-terminal nucleic acid is a nucleoside, i.e. base + sugar but lacking 5'-phosphate
  modified_base 1, 2, 3, 6, 9, 11, 12, 13: /mod_base = "2'-O-methyl corresponding base"
  modified_base 21: /mod_base = "5'-thio thymidine"
  modified_base 4, 5, 7, 8, 10, 14, 15, 16, 17, 18, 19: /mod_base = "2'-hydroxy corresponding base"
cuuaguaguguccaggaaatt

SEQ ID NO: 720 - DNA, 21 bp, artificial sequence
  siRNA reactive to human Eg5
  5'-terminal nucleic acid is a nucleoside, i.e. base + sugar but lacking 5'-phosphate
  modified_base 10, 13, 16: /mod_base = "2'-O-methyl corresponding base"
  modified_base 21: /mod_base = "5'-thio thymidine"
  modified_base 1, 2, 3, 4, 5, 6, 7, 8, 9, 11, 12, 14, 15, 17, 18, 19: /mod_base = "2'-hydroxy corresponding base"
uuuccuggacacuacuaagtt

SEQ ID NO: 721 - DNA, 21 bp, artificial sequence
  siRNA reactive to human Eg5
  5'-terminal nucleic acid is a nucleoside, i.e. base + sugar but lacking 5'-phosphate
  modified_base 1, 2, 6, 10, 12, 17: /mod_base = "2'-O-methyl corresponding base"
  modified_base 21: /mod_base = "5'-thio thymidine"
  modified_base 3, 4, 5, 7, 8, 9, 11, 13, 14, 15, 16, 18, 19: /mod_base = "2'-hydroxy corresponding base"
ucagauggacguaaggcagtt

SEQ ID NO: 722 - DNA, 21 bp, artificial sequence
  siRNA reactive to human Eg5
  5'-terminal nucleic acid is a nucleoside, i.e. base + sugar but lacking 5'-phosphate
  modified_base 7, 13: /mod_base = "2'-O-methyl corresponding base"
  modified_base 21: /mod_base = "5'-thio thymidine"
  modified_base 1, 2, 3, 4, 5, 6, 8, 9, 10, 11, 12, 14, 15, 16, 17, 18, 19: /mod_base = "2'-hydroxy corresponding base"
cugccuuacguccaucugatt

SEQ ID NO: 723 - DNA, 21 bp, artificial sequence
  siRNA reactive to human Eg5
  5'-terminal nucleic acid is a nucleoside, i.e. base + sugar but lacking 5'-phosphate
  modified_base 4, 8, 9, 12, 15, 17: /mod_base = "2'-O-methyl corresponding base"
  modified_base 21: /mod_base = "5'-thio thymidine"
  modified_base 1, 2, 3, 5, 6, 7, 10, 11, 13, 14, 16, 18, 19: /mod_base = "2'-hydroxy corresponding base"
agauaaauugauagcacaatt

SEQ ID NO: 724 - DNA, 21 bp, artificial sequence
  siRNA reactive to human Eg5
  5'-terminal nucleic acid is a nucleoside, i.e. base + sugar but lacking 5'-phosphate
  modified_base 7, 10, 15: /mod_base = "2'-O-methyl corresponding base"
  modified_base 21: /mod_base = "5'-thio thymidine"
  modified_base 1, 2, 3, 4, 5, 6, 8, 9, 11, 12, 13, 14, 16, 17, 18, 19: /mod_base = "2'-hydroxy corresponding base"
uugugcuaucaauuuaucutt

SEQ ID NO: 725 - DNA, 21 bp, artificial sequence
  siRNA reactive to human Eg5
  5'-terminal nucleic acid is a nucleoside, i.e. base + sugar but lacking 5'-phosphate
  modified_base 1, 4, 8, 10, 13, 15, 16, 18: /mod_base = "2'-O-methyl corresponding base"
  modified_base 21: /mod_base = "5'-thio thymidine"
  modified_base 2, 3, 5, 6, 7, 9, 11, 12, 14, 17, 19: /mod_base = "2'-hydroxy corresponding base"
caacagguacgacaccacatt

SEQ ID NO: 726 - DNA, 21 bp, artificial sequence
  siRNA reactive to human Eg5
  5'-terminal nucleic acid is a nucleoside, i.e. base + sugar but lacking 5'-phosphate
  modified_base 11: /mod_base = "2'-O-methyl corresponding base"
  modified_base 21: /mod_base = "5'-thio thymidine"
  modified_base 1, 2, 3, 4, 5, 6, 7, 8, 9, 10, 12, 13, 14, 15, 16, 17, 18, 19: /mod_base = "2'-hydroxy corresponding base"
uguggugucguaccuguugtt

SEQ ID NO: 727 - DNA, 21 bp, artificial sequence
  siRNA reactive to human Eg5
  5'-terminal nucleic acid is a nucleoside, i.e. base + sugar but lacking 5'-phosphate
  modified_base 1, 3, 6, 8, 12, 14, 16, 18, 19: /mod_base = "2'-O-methyl corresponding base"
  modified_base 21: /mod_base = "5'-thio thymidine"
  modified_base 2, 4, 5, 7, 9, 10, 11, 13, 15, 17: /mod_base = "2'-hydroxy corresponding base"
ugcaauguaaauacguauutt

SEQ ID NO: 728 - DNA, 21 bp, artificial sequence
  siRNA reactive to human Eg5
  5'-terminal nucleic acid is a nucleoside, i.e. base + sugar but lacking 5'-phosphate
  modified_base 3, 7, 11, 13, 18: /mod_base = "2'-O-methyl corresponding base"
  modified_base 21: /mod_base = "5'-thio thymidine"
  modified_base 1, 2, 4, 5, 6, 8, 9, 10, 12, 14, 15, 16, 17, 19: /mod_base = "2'-hydroxy corresponding base"
aauacguauuuacauugcatt

SEQ ID NO: 729 - DNA, 21 bp, artificial sequence
  siRNA reactive to human Eg5
  5'-terminal nucleic acid is a nucleoside, i.e. base + sugar but lacking 5'-phosphate
  modified_base 3, 4, 9, 10, 11, 12, 14, 15, 16: /mod_base = "2'-O-methyl corresponding base"
  modified_base 21: /mod_base = "5'-thio thymidine"
  modified_base 1, 2, 5, 6, 7, 8, 13, 17, 18, 19: /mod_base = "2'-hydroxy corresponding base"
agucagaauuuuaucuagatt

SEQ ID NO: 730 - DNA, 21 bp, artificial sequence
  siRNA reactive to human Eg5
  5'-terminal nucleic acid is a nucleoside, i.e. base + sugar but lacking 5'-phosphate
  modified_base 3, 7: /mod_base = "2'-O-methyl corresponding base"
  modified_base 21: /mod_base = "5'-thio thymidine"
  modified_base 1, 2, 4, 5, 6, 8, 9, 10, 11, 12, 13, 14, 15, 16, 17, 18, 19: /mod_base = "2'-hydroxy corresponding base"
ucuagauaaaauucugacutt

SEQ ID NO: 731 - DNA, 21 bp, artificial sequence
  siRNA reactive to human Eg5
  5'-terminal nucleic acid is a nucleoside, i.e. base + sugar but lacking 5'-phosphate
  modified_base 1, 2, 8, 9, 10, 11, 12, 13, 16, 18, 19: /mod_base = "2'-O-methyl corresponding base"
  modified_base 21: /mod_base = "5'-thio thymidine"
  modified_base 3, 4, 5, 6, 7, 14, 15, 17: /mod_base = "2'-hydroxy corresponding base"
cuagaaaucuuuuaacacctt

SEQ ID NO: 732 - DNA, 21 bp, artificial sequence
  siRNA reactive to human Eg5
  5'-terminal nucleic acid is a nucleoside, i.e. base + sugar but lacking 5'-phosphate
  modified_base 6, 17: /mod_base = "2'-O-methyl corresponding base"
  modified_base 21: /mod_base = "5'-thio thymidine"
  modified_base 1, 2, 3, 4, 5, 7, 8, 9, 10, 11, 12, 13, 14, 15, 16, 18, 19: /mod_base = "2'-hydroxy corresponding base"
gguguuaaaagauuucuagtt

SEQ ID NO: 733 - DNA, 21 bp, artificial sequence
  siRNA reactive to human Eg5
  5'-terminal nucleic acid is a nucleoside, i.e. base + sugar but lacking 5'-phosphate
  modified_base 3, 7, 8, 9, 12, 13, 14, 15, 18, 19: /mod_base = "2'-O-methyl corresponding base"
  modified_base 21: /mod_base = "5'-thio thymidine"
  modified_base 1, 2, 4, 5, 6, 10, 11, 16, 17: /mod_base = "2'-hydroxy corresponding base"
aauaaaucuaacccuaguutt

SEQ ID NO: 734 - DNA, 21 bp, artificial sequence
  siRNA reactive to human Eg5
  5'-terminal nucleic acid is a nucleoside, i.e. base + sugar but lacking 5'-phosphate
  modified_base 4, 10, 16: /mod_base = "2'-O-methyl corresponding base"
  modified_base 21: /mod_base = "5'-thio thymidine"
  modified_base 1, 2, 3, 5, 6, 7, 8, 9, 11, 12, 13, 14, 15, 17, 18, 19: /mod_base = "2'-hydroxy corresponding base"
aacuaggguuagauuuauutt

SEQ ID NO: 735 - DNA, 21 bp, artificial sequence
  siRNA reactive to human Eg5
  5'-terminal nucleic acid is a nucleoside, i.e. base + sugar but lacking 5'-phosphate
  modified_base 3, 4, 5, 6, 7, 8, 10, 11, 12, 14, 17: /mod_base = "2'-O-methyl corresponding base"
  modified_base 21: /mod_base = "5'-thio thymidine"
  modified_base 1, 2, 9, 13, 15, 16, 18, 19: /mod_base = "2'-hydroxy corresponding base"
aauuuucugcucacgaugatt

SEQ ID NO: 736 - DNA, 21 bp, artificial sequence
  siRNA reactive to human Eg5
  5'-terminal nucleic acid is a nucleoside, i.e. base + sugar but lacking 5'-phosphate
  modified_base 2, 11: /mod_base = "2'-O-methyl corresponding base"
  modified_base 21: /mod_base = "5'-thio thymidine"
  modified_base 1, 3, 4, 5, 6, 7, 8, 9, 10, 12, 13, 14, 15, 16, 17, 18, 19: /mod_base = "2'-hydroxy corresponding base"
ucaucgugagcagaaaauutt

SEQ ID NO: 737 - DNA, 21 bp, artificial sequence
  siRNA reactive to human Eg5
  5'-terminal nucleic acid is a nucleoside, i.e. base + sugar but lacking 5'-phosphate
  modified_base 2, 3, 4, 5, 6, 9, 13, 14, 15, 17: /mod_base = "2'-O-methyl corresponding base"
  modified_base 21: /mod_base = "5'-thio thymidine"
  modified_base 1, 7, 8, 10, 11, 12, 16, 18, 19: /mod_base = "2'-hydroxy corresponding base"
gcccucaguaaauccauggtt

SEQ ID NO: 738 - DNA, 21 bp, artificial sequence
  siRNA reactive to human Eg5
  5'-terminal nucleic acid is a nucleoside, i.e. base + sugar but lacking 5'-phosphate
  modified_base 2, 10: /mod_base = "2'-O-methyl corresponding base"
  modified_base 21: /mod_base = "5'-thio thymidine"
  modified_base 1, 3, 4, 5, 6, 7, 8, 9, 11, 12, 13, 14, 15, 16, 17, 18, 19: /mod_base = "2'-hydroxy corresponding base"
ccauggauuuacugagggctt

SEQ ID NO: 739 - DNA, 21 bp, artificial sequence
  siRNA reactive to human Eg5
  5'-terminal nucleic acid is a nucleoside, i.e. base + sugar but lacking 5'-phosphate
  modified_base 2, 4, 5, 6, 11, 16, 17, 18, 19: /mod_base = "2'-O-methyl corresponding base"
  modified_base 21: /mod_base = "5'-thio thymidine"
  modified_base 1, 3, 7, 8, 9, 10, 12, 13, 14, 15: /mod_base = "2'-hydroxy corresponding base"
acguuuaaaacgagaucuutt

SEQ ID NO: 740 - DNA, 21 bp, artificial sequence
  siRNA reactive to human Eg5
  5'-terminal nucleic acid is a nucleoside, i.e. base + sugar but lacking 5'-phosphate
  modified_base 13: /mod_base = "2'-O-methyl corresponding base"
  modified_base 21: /mod_base = "5'-thio thymidine"
  modified_base 1, 2, 3, 4, 5, 6, 7, 8, 9, 10, 11, 12, 14, 15, 16, 17, 18, 19: /mod_base = "2'-hydroxy corresponding base"
aagaucucguuuuaaacgutt

SEQ ID NO: 741 - DNA, 21 bp, artificial sequence
  siRNA reactive to human Eg5
  5'-terminal nucleic acid is a nucleoside, i.e. base + sugar but lacking 5'-phosphate
  modified_base 7, 12, 14, 15, 16: /mod_base = "2'-O-methyl corresponding base"
  modified_base 21: /mod_base = "5'-thio thymidine"
  modified_base 1, 2, 3, 4, 5, 6, 8, 9, 10, 11, 13, 17, 18, 19: /mod_base = "2'-hydroxy corresponding base"
aggagauagaacguuuaaatt

SEQ ID NO: 742 - DNA, 21 bp, artificial sequence
  siRNA reactive to human Eg5
  5'-terminal nucleic acid is a nucleoside, i.e. base + sugar but lacking 5'-phosphate
  modified_base 3, 12: /mod_base = "2'-O-methyl corresponding base"
  modified_base 21: /mod_base = "5'-thio thymidine"
  modified_base 1, 2, 4, 5, 6, 7, 8, 9, 10, 11, 13, 14, 15, 16, 17, 18, 19: /mod_base = "2'-hydroxy corresponding base"
uuuaaacguucuaucuccutt

SEQ ID NO: 743 - DNA, 21 bp, artificial sequence
  siRNA reactive to human Eg5
  5'-terminal nucleic acid is a nucleoside, i.e. base + sugar but lacking 5'-phosphate
  modified_base 3, 4, 6, 7, 9, 12, 14, 15, 17: /mod_base = "2'-O-methyl corresponding base"
  modified_base 21: /mod_base = "5'-thio thymidine"
  modified_base 1, 2, 5, 8, 10, 11, 13, 16, 18, 19: /mod_base = "2'-hydroxy corresponding base"
gaccgucauggcgucgcagtt

SEQ ID NO: 744 - DNA, 21 bp, artificial sequence
  siRNA reactive to human Eg5
  5'-terminal nucleic acid is a nucleoside, i.e. base + sugar but lacking 5'-phosphate
  modified_base 10: /mod_base = "2'-O-methyl corresponding base"
  modified_base 21: /mod_base = "5'-thio thymidine"
  modified_base 1, 2, 3, 4, 5, 6, 7, 8, 9, 11, 12, 13, 14, 15, 16, 17, 18, 19: /mod_base = "2'-hydroxy corresponding base"
cugcgacgccaugacgguctt

SEQ ID NO: 745 - DNA, 21 bp, artificial sequence
  siRNA reactive to human Eg5
  5'-terminal nucleic acid is a nucleoside, i.e. base + sugar but lacking 5'-phosphate
  modified_base 2, 3, 5, 6, 8, 11, 13, 14, 16, 19: /mod_base = "2'-O-methyl corresponding base"
  modified_base 21: /mod_base = "5'-thio thymidine"
  modified_base 1, 4, 7, 9, 10, 12, 15, 17, 18: /mod_base = "2'-hydroxy corresponding base"
accgucauggcgucgcagctt

SEQ ID NO: 746 - DNA, 21 bp, artificial sequence
  siRNA reactive to human Eg5
  5'-terminal nucleic acid is a nucleoside, i.e. base + sugar but lacking 5'-phosphate
  modified_base 11: /mod_base = "2'-O-methyl corresponding base"
  modified_base 21: /mod_base = "5'-thio thymidine"
  modified_base 1, 2, 3, 4, 5, 6, 7, 8, 9, 10, 12, 13, 14, 15, 16, 17, 18, 19: /mod_base = "2'-hydroxy corresponding base"
gcugcgacgccaugacggutt

SEQ ID NO: 747 - DNA, 21 bp, artificial sequence
  siRNA reactive to human Eg5
  5'-terminal nucleic acid is a nucleoside, i.e. base + sugar but lacking 5'-phosphate
  modified_base 4, 6, 7, 8, 13, 18, 19: /mod_base = "2'-O-methyl corresponding base"
  modified_base 21: /mod_base = "5'-thio thymidine"
  modified_base 1, 2, 3, 5, 9, 10, 11, 12, 14, 15, 16, 17: /mod_base = "2'-hydroxy corresponding base"
gaacguuuaaaacgagauctt

SEQ ID NO: 748 - DNA, 21 bp, artificial sequence
  siRNA reactive to human Eg5
  5'-terminal nucleic acid is a nucleoside, i.e. base + sugar but lacking 5'-phosphate
  modified_base 11: /mod_base = "2'-O-methyl corresponding base"
  modified_base 21: /mod_base = "5'-thio thymidine"
  modified_base 1, 2, 3, 4, 5, 6, 7, 8, 9, 10, 12, 13, 14, 15, 16, 17, 18, 19: /mod_base = "2'-hydroxy corresponding base"
gaucucguuuuaaacguuctt

SEQ ID NO: 749 - DNA, 21 bp, artificial sequence
  siRNA reactive to human Eg5
  5'-terminal nucleic acid is a nucleoside, i.e. base + sugar but lacking 5'-phosphate
  modified_base 1, 2, 6, 7, 8, 11, 13, 17: /mod_base = "2'-O-methyl corresponding base"
  modified_base 21: /mod_base = "5'-thio thymidine"
  modified_base 3, 4, 5, 9, 10, 12, 14, 15, 16, 18, 19: /mod_base = "2'-hydroxy corresponding base"
uugagcuuaacauagguaatt

SEQ ID NO: 750 - DNA, 21 bp, artificial sequence
  siRNA reactive to human Eg5
  5'-terminal nucleic acid is a nucleoside, i.e. base + sugar but lacking 5'-phosphate
  modified_base 2, 6, 11, 17: /mod_base = "2'-O-methyl corresponding base"
  modified_base 21: /mod_base = "5'-thio thymidine"
  modified_base 1, 3, 4, 5, 7, 8, 9, 10, 12, 13, 14, 15, 16, 18, 19: /mod_base = "2'-hydroxy corresponding base"
uuaccuauguuaagcucaatt

SEQ ID NO: 751 - DNA, 21 bp, artificial sequence
  siRNA reactive to human Eg5
  5'-terminal nucleic acid is a nucleoside, i.e. base + sugar but lacking 5'-phosphate
  modified_base 2, 3, 7, 8, 11, 12, 13, 14, 16: /mod_base = "2'-O-methyl corresponding base"
  modified_base 21: /mod_base = "5'-thio thymidine"
  modified_base 1, 4, 5, 6, 9, 10, 15, 17, 18, 19: /mod_base = "2'-hydroxy corresponding base"
acuaaauugaucucguagatt

SEQ ID NO: 752 - DNA, 21 bp, artificial sequence
  siRNA reactive to human Eg5
  5'-terminal nucleic acid is a nucleoside, i.e. base + sugar but lacking 5'-phosphate
  modified_base 3, 11, 16: /mod_base = "2'-O-methyl corresponding base"
  modified_base 21: /mod_base = "5'-thio thymidine"
  modified_base 1, 2, 4, 5, 6, 7, 8, 9, 10, 12, 13, 14, 15, 17, 18, 19: /mod_base = "2'-hydroxy corresponding base"
ucuacgagaucaauuuagutt

SEQ ID NO: 753 - DNA, 21 bp, artificial sequence
  siRNA reactive to human Eg5
  5'-terminal nucleic acid is a nucleoside, i.e. base + sugar but lacking 5'-phosphate
  modified_base 1, 2, 4, 9, 10, 12, 13, 14, 15, 18: /mod_base = "2'-O-methyl corresponding base"
  modified_base 21: /mod_base = "5'-thio thymidine"
  modified_base 3, 5, 6, 7, 8, 11, 16, 17, 19: /mod_base = "2'-hydroxy corresponding base"
ucguagaauuaucuuaauatt

SEQ ID NO: 754 - DNA, 21 bp, artificial sequence
  siRNA reactive to human Eg5
  5'-terminal nucleic acid is a nucleoside, i.e. base + sugar but lacking 5'-phosphate
  modified_base 1, 4, 9, 15: /mod_base = "2'-O-methyl corresponding base"
  modified_base 21: /mod_base = "5'-thio thymidine"
  modified_base 2, 3, 5, 6, 7, 8, 10, 11, 12, 13, 14, 16, 17, 18, 19: /mod_base = "2'-hydroxy corresponding base"
uauuaagauaauucuacgatt

SEQ ID NO: 755 - DNA, 21 bp, artificial sequence
  siRNA reactive to human Eg5
  5'-terminal nucleic acid is a nucleoside, i.e. base + sugar but lacking 5'-phosphate
  modified_base 6, 11, 13, 14, 15: /mod_base = "2'-O-methyl corresponding base"
  modified_base 21: /mod_base = "5'-thio thymidine"
  modified_base 1, 2, 3, 4, 5, 7, 8, 9, 10, 12, 16, 17, 18, 19: /mod_base = "2'-hydroxy corresponding base"
ggagauagaacguuuaaaatt

SEQ ID NO: 756 - DNA, 21 bp, artificial sequence
  siRNA reactive to human Eg5
  5'-terminal nucleic acid is a nucleoside, i.e. base + sugar but lacking 5'-phosphate
  modified_base 4, 13: /mod_base = "2'-O-methyl corresponding base"
  modified_base 21: /mod_base = "5'-thio thymidine"
  modified_base 1, 2, 3, 5, 6, 7, 8, 9, 10, 11, 12, 14, 15, 16, 17, 18, 19: /mod_base = "2'-hydroxy corresponding base"
uuuuaaacguucuaucucctt

SEQ ID NO: 757 - DNA, 21 bp, artificial sequence
  siRNA reactive to human Eg5
  5'-terminal nucleic acid is a nucleoside, i.e. base + sugar but lacking 5'-phosphate
  modified_base 2, 5, 6, 7, 9, 10, 16, 17, 19: /mod_base = "2'-O-methyl corresponding base"
  modified_base 21: /mod_base = "5'-thio thymidine"
  modified_base 1, 3, 4, 8, 11, 12, 13, 14, 15, 18: /mod_base = "2'-hydroxy corresponding base"
acaacuuauuggagguugutt

SEQ ID NO: 758 - DNA, 21 bp, artificial sequence
  siRNA reactive to human Eg5
  5'-terminal nucleic acid is a nucleoside, i.e. base + sugar but lacking 5'-phosphate
  modified_base 2, 9, 12: /mod_base = "2'-O-methyl corresponding base"
  modified_base 21: /mod_base = "5'-thio thymidine"
  modified_base 1, 3, 4, 5, 6, 7, 8, 10, 11, 13, 14, 15, 16, 17, 18, 19: /mod_base = "2'-hydroxy corresponding base"
acaaccuccaauaaguugutt

SEQ ID NO: 759 - DNA, 21 bp, artificial sequence
  siRNA reactive to human Eg5
  5'-terminal nucleic acid is a nucleoside, i.e. base + sugar but lacking 5'-phosphate
  modified_base 1, 5, 6, 7, 10, 12, 16: /mod_base = "2'-O-methyl corresponding base"
  modified_base 21: /mod_base = "5'-thio thymidine"
  modified_base 2, 3, 4, 8, 9, 11, 13, 14, 15, 17, 18, 19: /mod_base = "2'-hydroxy corresponding base"
ugagcuuaacauagguaaatt

SEQ ID NO: 760 - DNA, 21 bp, artificial sequence
  siRNA reactive to human Eg5
  5'-terminal nucleic acid is a nucleoside, i.e. base + sugar but lacking 5'-phosphate
  modified_base 3, 7, 12, 18: /mod_base = "2'-O-methyl corresponding base"
  modified_base 21: /mod_base = "5'-thio thymidine"
  modified_base 1, 2, 4, 5, 6, 8, 9, 10, 11, 13, 14, 15, 16, 17, 19: /mod_base = "2'-hydroxy corresponding base"
uuuaccuauguuaagcucatt

SEQ ID NO: 761 - DNA, 21 bp, artificial sequence
  siRNA reactive to human Eg5
  5'-terminal nucleic acid is a nucleoside, i.e. base + sugar but lacking 5'-phosphate
  modified_base 2, 3, 4, 5, 7, 12, 13, 15, 16, 17, 18: /mod_base = "2'-O-methyl corresponding base"
  modified_base 21: /mod_base = "5'-thio thymidine"
  modified_base 1, 6, 8, 9, 10, 11, 14, 19: /mod_base = "2'-hydroxy corresponding base"
aucucguagaauuaucuuatt

SEQ ID NO: 762 - DNA, 21 bp, artificial sequence
  siRNA reactive to human Eg5
  5'-terminal nucleic acid is a nucleoside, i.e. base + sugar but lacking 5'-phosphate
  modified_base 1, 6, 12: /mod_base = "2'-O-methyl corresponding base"
  modified_base 21: /mod_base = "5'-thio thymidine"
  modified_base 2, 3, 4, 5, 7, 8, 9, 10, 11, 13, 14, 15, 16, 17, 18, 19: /mod_base = "2'-hydroxy corresponding base"
uaagauaauucuacgagautt

SEQ ID NO: 763 - DNA, 21 bp, artificial sequence
  siRNA reactive to human Eg5
  5'-terminal nucleic acid is a nucleoside, i.e. base + sugar but lacking 5'-phosphate
  modified_base 1, 2, 4, 6, 8, 11, 12, 15, 16, 17, 18, 19: /mod_base = "2'-O-methyl corresponding base"
  modified_base 21: /mod_base = "5'-thio thymidine"
  modified_base 3, 5, 7, 9, 10, 13, 14: /mod_base = "2'-hydroxy corresponding base"
cugcgugcagucgguccuctt

SEQ ID NO: 764 - DNA, 21 bp, artificial sequence
  siRNA reactive to human Eg5
  5'-terminal nucleic acid is a nucleoside, i.e. base + sugar but lacking 5'-phosphate
  modified_base 13, 17: /mod_base = "2'-O-methyl corresponding base"
  modified_base 21: /mod_base = "5'-thio thymidine"
  modified_base 1, 2, 3, 4, 5, 6, 7, 8, 9, 10, 11, 12, 14, 15, 16, 18, 19: /mod_base = "2'-hydroxy corresponding base"
gaggaccgacugcacgcagtt

SEQ ID NO: 765 - DNA, 21 bp, artificial sequence
  siRNA reactive to human Eg5
  5'-terminal nucleic acid is a nucleoside, i.e. base + sugar but lacking 5'-phosphate
  modified_base 1, 3, 5, 8, 10, 11, 12, 18: /mod_base = "2'-O-methyl corresponding base"
  modified_base 21: /mod_base = "5'-thio thymidine"
  modified_base 2, 4, 6, 7, 9, 13, 14, 15, 16, 17, 19: /mod_base = "2'-hydroxy corresponding base"
cacgcagcgcccgagaguatt

SEQ ID NO: 766 - DNA, 21 bp, artificial sequence
  siRNA reactive to human Eg5
  5'-terminal nucleic acid is a nucleoside, i.e. base + sugar but lacking 5'-phosphate
  modified_base 1: /mod_base = "2'-O-methyl corresponding base"
  modified_base 21: /mod_base = "5'-thio thymidine"
  modified_base 2..19: /mod_base = "2'-hydroxy corresponding base"
uacucucgggcgcugcgugtt

SEQ ID NO: 767 - DNA, 21 bp, artificial sequence
  siRNA reactive to human Eg5
  5'-terminal nucleic acid is a nucleoside, i.e. base + sugar but lacking 5'-phosphate
  modified_base 3, 5, 6, 14, 15, 16, 17: /mod_base = "2'-O-methyl corresponding base"
  modified_base 21: /mod_base = "5'-thio thymidine"
  modified_base 1, 2, 4, 7, 8, 9, 10, 11, 12, 13, 18, 19: /mod_base = "2'-hydroxy corresponding base"
aguaccagggagacuccggtt

SEQ ID NO: 768 - DNA, 21 bp, artificial sequence
  siRNA reactive to human Eg5
  5'-terminal nucleic acid is a nucleoside, i.e. base + sugar but lacking 5'-phosphate
  modified_base 16: /mod_base = "2'-O-methyl corresponding base"
  modified_base 21: /mod_base = "5'-thio thymidine"
  modified_base 1, 2, 3, 4, 5, 6, 7, 8, 9, 10, 11, 12, 13, 14, 15, 17, 18, 19: /mod_base = "2'-hydroxy corresponding base"
ccggagucucccugguacutt

SEQ ID NO: 769 - DNA, 21 bp, artificial sequence
  siRNA reactive to human Eg5
  5'-terminal nucleic acid is a nucleoside, i.e. base + sugar but lacking 5'-phosphate
  modified_base 2, 11, 16, 18, 19: /mod_base = "2'-O-methyl corresponding base"
  modified_base 21: /mod_base = "5'-thio thymidine"
  modified_base 1, 3, 4, 5, 6, 7, 8, 9, 10, 12, 13, 14, 15, 17: /mod_base = "2'-hydroxy corresponding base"
acggaggagauagaacguutt

SEQ ID NO: 770 - DNA, 21 bp, artificial sequence
  siRNA reactive to human Eg5
  5'-terminal nucleic acid is a nucleoside, i.e. base + sugar but lacking 5'-phosphate
  modified_base 8: /mod_base = "2'-O-methyl corresponding base"
  modified_base 21: /mod_base = "5'-thio thymidine"
  modified_base 1, 2, 3, 4, 5, 6, 7, 9, 10, 11, 12, 13, 14, 15, 16, 17, 18, 19: /mod_base = "2'-hydroxy corresponding base"
aacguucuaucuccuccgutt

SEQ ID NO: 771 - DNA, 21 bp, artificial sequence
  siRNA reactive to human Eg5
  5'-terminal nucleic acid is a nucleoside, i.e. base + sugar but lacking 5'-phosphate
  modified_base 5, 7, 8, 9, 14, 19: /mod_base = "2'-O-methyl corresponding base"
  modified_base 21: /mod_base = "5'-thio thymidine"
  modified_base 1, 2, 3, 4, 6, 10, 11, 12, 13, 15, 16, 17, 18: /mod_base = "2'-hydroxy corresponding base"
agaacguuuaaaacgagautt

SEQ ID NO: 772 - DNA, 21 bp, artificial sequence
  siRNA reactive to human Eg5
  5'-terminal nucleic acid is a nucleoside, i.e. base + sugar but lacking 5'-phosphate
  modified_base 10: /mod_base = "2'-O-methyl corresponding base"
  modified_base 21: /mod_base = "5'-thio thymidine"
  modified_base 1, 2, 3, 4, 5, 6, 7, 8, 9, 11, 12, 13, 14, 15, 16, 17, 18, 19: /mod_base = "2'-hydroxy corresponding base"
aucucguuuuaaacguucutt

SEQ ID NO: 773 - DNA, 21 bp, artificial sequence
  siRNA reactive to human Eg5
  5'-terminal nucleic acid is a nucleoside, i.e. base + sugar but lacking 5'-phosphate
  modified_base 3, 5, 6, 7, 12, 17, 18, 19: /mod_base = "2'-O-methyl corresponding base"
  modified_base 21: /mod_base = "5'-thio thymidine"
  modified_base 1, 2, 4, 8, 9, 10, 11, 13, 14, 15, 16: /mod_base = "2'-hydroxy corresponding base"
aacguuuaaaacgagaucutt

SEQ ID NO: 774 - DNA, 21 bp, artificial sequence
  siRNA reactive to human Eg5
  5'-terminal nucleic acid is a nucleoside, i.e. base + sugar but lacking 5'-phosphate
  modified_base 12: /mod_base = "2'-O-methyl corresponding base"
  modified_base 21: /mod_base = "5'-thio thymidine"
  modified_base 1, 2, 3, 4, 5, 6, 7, 8, 9, 10, 11, 13, 14, 15, 16, 17, 18, 19: /mod_base = "2'-hydroxy corresponding base"
agaucucguuuuaaacguutt

SEQ ID NO: 775 - DNA, 21 bp, artificial sequence
  siRNA reactive to human Eg5
  5'-terminal nucleic acid is a nucleoside, i.e. base + sugar but lacking 5'-phosphate
  modified_base 3, 4, 5, 9, 10, 11, 14, 16: /mod_base = "2'-O-methyl corresponding base"
  modified_base 21: /mod_base = "5'-thio thymidine"
  modified_base 1, 2, 6, 7, 8, 12, 13, 15, 17, 18, 19: /mod_base = "2'-hydroxy corresponding base"
agcuugagcuuaacauaggtt

SEQ ID NO: 776 - DNA, 21 bp, artificial sequence
  siRNA reactive to human Eg5
  5'-terminal nucleic acid is a nucleoside, i.e. base + sugar but lacking 5'-phosphate
  modified_base 3, 8, 14: /mod_base = "2'-O-methyl corresponding base"
  modified_base 21: /mod_base = "5'-thio thymidine"
  modified_base 1, 2, 4, 5, 6, 7, 9, 10, 11, 12, 13, 15, 16, 17, 18, 19: /mod_base = "2'-hydroxy corresponding base"
ccuauguuaagcucaagcutt

SEQ ID NO: 777 - DNA, 21 bp, artificial sequence
  siRNA reactive to human Eg5
  5'-terminal nucleic acid is a nucleoside, i.e. base + sugar but lacking 5'-phosphate
  modified_base 3, 4, 5, 8, 10, 14, 18: /mod_base = "2'-O-methyl corresponding base"
  modified_base 21: /mod_base = "5'-thio thymidine"
  modified_base 1, 2, 6, 7, 9, 11, 12, 13, 15, 16, 17, 19: /mod_base = "2'-hydroxy corresponding base"
agcuuaacauagguaaauatt

SEQ ID NO: 778 - DNA, 21 bp, artificial sequence
  siRNA reactive to human Eg5
  5'-terminal nucleic acid is a nucleoside, i.e. base + sugar but lacking 5'-phosphate
  modified_base 1, 5, 9, 14: /mod_base = "2'-O-methyl corresponding base"
  modified_base 21: /mod_base = "5'-thio thymidine"
  modified_base 2, 3, 4, 6, 7, 8, 10, 11, 12, 13, 15, 16, 17, 18, 19: /mod_base = "2'-hydroxy corresponding base"
uauuuaccuauguuaagcutt

SEQ ID NO: 779 - DNA, 21 bp, artificial sequence
  siRNA reactive to human Eg5
  5'-terminal nucleic acid is a nucleoside, i.e. base + sugar but lacking 5'-phosphate
  modified_base 1, 6, 7, 9, 14, 15, 16, 18, 19: /mod_base = "2'-O-methyl corresponding base"
  modified_base 21: /mod_base = "5'-thio thymidine"
  modified_base 2, 3, 4, 5, 8, 10, 11, 12, 13, 17: /mod_base = "2'-hydroxy corresponding base"
uagagcuacaaaaccuauctt

SEQ ID NO: 780 - DNA, 21 bp, artificial sequence
  siRNA reactive to human Eg5
  5'-terminal nucleic acid is a nucleoside, i.e. base + sugar but lacking 5'-phosphate
  modified_base 3, 12, 18: /mod_base = "2'-O-methyl corresponding base"
  modified_base 21: /mod_base = "5'-thio thymidine"
  modified_base 1, 2, 4, 5, 6, 7, 8, 9, 10, 11, 13, 14, 15, 16, 17, 19: /mod_base = "2'-hydroxy corresponding base"
gauagguuuuguagcucuatt

SEQ ID NO: 781 - DNA, 21 bp, artificial sequence
  siRNA reactive to human Eg5
  5'-terminal nucleic acid is a nucleoside, i.e. base + sugar but lacking 5'-phosphate
  modified_base 1, 4, 5, 7, 9, 10, 11, 12, 13, 14, 15, 16, 17, 18: /mod_base = "2'-O-methyl corresponding base"
  modified_base 21: /mod_base = "5'-thio thymidine"
  modified_base 2, 3, 6, 8, 19: /mod_base = "2'-hydroxy corresponding base"
uaguuguaucccuccuuuatt

SEQ ID NO: 782 - DNA, 21 bp, artificial sequence
  siRNA reactive to human Eg5
  5'-terminal nucleic acid is a nucleoside, i.e. base + sugar but lacking 5'-phosphate
  modified_base 1, 12, 14, 18: /mod_base = "2'-O-methyl corresponding base"
  modified_base 21: /mod_base = "5'-thio thymidine"
  modified_base 2, 3, 4, 5, 6, 7, 8, 9, 10, 11, 13, 15, 16, 17, 19: /mod_base = "2'-hydroxy corresponding base"
uaaaggagggauacaacuatt

SEQ ID NO: 783 - DNA, 21 bp, artificial sequence
  siRNA reactive to human Eg5
  5'-terminal nucleic acid is a nucleoside, i.e. base + sugar but lacking 5'-phosphate
  modified_base 2, 3, 5, 6, 7, 11, 13, 14, 15, 18, 19: /mod_base = "2'-O-methyl corresponding base"
  modified_base 21: /mod_base = "5'-thio thymidine"
  modified_base 1, 4, 8, 9, 10, 12, 16, 17: /mod_base = "2'-hydroxy corresponding base"
accacccagacaucugacutt

SEQ ID NO: 784 - DNA, 21 bp, artificial sequence
  siRNA reactive to human Eg5
  5'-terminal nucleic acid is a nucleoside, i.e. base + sugar but lacking 5'-phosphate
  modified_base 4: /mod_base = "2'-O-methyl corresponding base"
  modified_base 21: /mod_base = "5'-thio thymidine"
  modified_base 1, 2, 3, 5, 6, 7, 8, 9, 10, 11, 12, 13, 14, 15, 16, 17, 18, 19: /mod_base = "2'-hydroxy corresponding base"
agucagaugucuggguggutt

SEQ ID NO: 785 - DNA, 21 bp, artificial sequence
  siRNA reactive to human Eg5
  5'-terminal nucleic acid is a nucleoside, i.e. base + sugar but lacking 5'-phosphate
  modified_base 6, 7, 11, 12, 15, 16, 17, 18: /mod_base = "2'-O-methyl corresponding base"
  modified_base 21: /mod_base = "5'-thio thymidine"
  modified_base 1, 2, 3, 4, 5, 8, 9, 10, 13, 14, 19: /mod_base = "2'-hydroxy corresponding base"
agaaacuaaauugaucucgtt

SEQ ID NO: 786 - DNA, 21 bp, artificial sequence
  siRNA reactive to human Eg5
  5'-terminal nucleic acid is a nucleoside, i.e. base + sugar but lacking 5'-phosphate
  modified_base 7, 12: /mod_base = "2'-O-methyl corresponding base"
  modified_base 21: /mod_base = "5'-thio thymidine"
  modified_base 1, 2, 3, 4, 5, 6, 8, 9, 10, 11, 13, 14, 15, 16, 17, 18, 19: /mod_base = "2'-hydroxy corresponding base"
cgagaucaauuuaguuucutt

SEQ ID NO: 787 - DNA, 21 bp, artificial sequence
  siRNA reactive to human Eg5
  5'-terminal nucleic acid is a nucleoside, i.e. base + sugar but lacking 5'-phosphate
  modified_base 1, 2, 3, 4, 6, 11, 12, 14, 15, 16, 17: /mod_base = "2'-O-methyl corresponding base"
  modified_base 21: /mod_base = "5'-thio thymidine"
  modified_base 5, 7, 8, 9, 10, 13, 18, 19: /mod_base = "2'-hydroxy corresponding base"
ucucguagaauuaucuuaatt

SEQ ID NO: 788 - DNA, 21 bp, artificial sequence
  siRNA reactive to human Eg5
  5'-terminal nucleic acid is a nucleoside, i.e. base + sugar but lacking 5'-phosphate
  modified_base 2, 7, 13: /mod_base = "2'-O-methyl corresponding base"
  modified_base 21: /mod_base = "5'-thio thymidine"
  modified_base 1, 3, 4, 5, 6, 8, 9, 10, 11, 12, 14, 15, 16, 17, 18, 19: /mod_base = "2'-hydroxy corresponding base"
uuaagauaauucuacgagatt

SEQ ID NO: 789 - DNA, 21 bp, artificial sequence
  siRNA reactive to human Eg5
  5'-terminal nucleic acid is a nucleoside, i.e. base + sugar but lacking 5'-phosphate
  modified_base 1, 4, 5, 6, 8, 9, 15, 16, 18: /mod_base = "2'-O-methyl corresponding base"
  modified_base 21: /mod_base = "5'-thio thymidine"
  modified_base 2, 3, 7, 10, 11, 12, 13, 14, 17, 19: /mod_base = "2'-hydroxy corresponding base"
caacuuauuggagguuguatt

SEQ ID NO: 790 - DNA, 21 bp, artificial sequence
  siRNA reactive to human Eg5
  5'-terminal nucleic acid is a nucleoside, i.e. base + sugar but lacking 5'-phosphate
  modified_base 1, 3, 10, 13: /mod_base = "2'-O-methyl corresponding base"
  modified_base 21: /mod_base = "5'-thio thymidine"
  modified_base 2, 4, 5, 6, 7, 8, 9, 11, 12, 14, 15, 16, 17, 18, 19: /mod_base = "2'-hydroxy corresponding base"
uacaaccuccaauaaguugtt

SEQ ID NO: 791 - DNA, 21 bp, artificial sequence
  siRNA reactive to human Eg5
  5'-terminal nucleic acid is a nucleoside, i.e. base + sugar but lacking 5'-phosphate
  modified_base 1, 2, 4, 6, 7, 8, 9, 10, 11, 12, 13, 14, 15, 19: /mod_base = "2'-O-methyl corresponding base"
  modified_base 21: /mod_base = "5'-thio thymidine"
  modified_base 3, 5, 16, 17, 18: /mod_base = "2'-hydroxy corresponding base"
uuguaucccuccuuuaagutt

SEQ ID NO: 792 - DNA, 21 bp, artificial sequence
  siRNA reactive to human Eg5
  5'-terminal nucleic acid is a nucleoside, i.e. base + sugar but lacking 5'-phosphate
  modified_base 4, 15, 17: /mod_base = "2'-O-methyl corresponding base"
  modified_base 21: /mod_base = "5'-thio thymidine"
  modified_base 1, 2, 3, 5, 6, 7, 8, 9, 10, 11, 12, 13, 14, 16, 18, 19: /mod_base = "2'-hydroxy corresponding base"
acuuaaaggagggauacaatt

SEQ ID NO: 793 - DNA, 21 bp, artificial sequence
  siRNA reactive to human Eg5
  5'-terminal nucleic acid is a nucleoside, i.e. base + sugar but lacking 5'-phosphate
  modified_base 1, 2, 4, 7, 8, 9, 11, 12, 18, 19: /mod_base = "2'-O-methyl corresponding base"
  modified_base 21: /mod_base = "5'-thio thymidine"
  modified_base 3, 5, 6, 10, 13, 14, 15, 16, 17: /mod_base = "2'-hydroxy corresponding base"
ucacaacuuauuggagguutt

SEQ ID NO: 794 - DNA, 21 bp, artificial sequence
  siRNA reactive to human Eg5
  5'-terminal nucleic acid is a nucleoside, i.e. base + sugar but lacking 5'-phosphate
  modified_base 7, 10: /mod_base = "2'-O-methyl corresponding base"
  modified_base 21: /mod_base = "5'-thio thymidine"
  modified_base 1, 2, 3, 4, 5, 6, 8, 9, 11, 12, 13, 14, 15, 16, 17, 18, 19: /mod_base = "2'-hydroxy corresponding base"
aaccuccaauaaguugugatt

SEQ ID NO: 795 - DNA, 21 bp, artificial sequence
  siRNA reactive to human Eg5
  5'-terminal nucleic acid is a nucleoside, i.e. base + sugar but lacking 5'-phosphate
  modified_base 5, 6, 8, 10, 11, 12, 13, 14, 15, 16, 17: /mod_base = "2'-O-methyl corresponding base"
  modified_base 21: /mod_base = "5'-thio thymidine"
  modified_base 1, 2, 3, 4, 7, 9, 18, 19: /mod_base = "2'-hydroxy corresponding base"
agaacuguacucuucucagtt

SEQ ID NO: 796 - DNA, 21 bp, artificial sequence
  siRNA reactive to human Eg5
  5'-terminal nucleic acid is a nucleoside, i.e. base + sugar but lacking 5'-phosphate
  modified_base 11, 13: /mod_base = "2'-O-methyl corresponding base"
  modified_base 21: /mod_base = "5'-thio thymidine"
  modified_base 1, 2, 3, 4, 5, 6, 7, 8, 9, 10, 12, 14, 15, 16, 17, 18, 19: /mod_base = "2'-hydroxy corresponding base"
cugagaagaguacaguucutt

SEQ ID NO: 797 - DNA, 21 bp, artificial sequence
  siRNA reactive to human Eg5
  5'-terminal nucleic acid is a nucleoside, i.e. base + sugar but lacking 5'-phosphate
  modified_base 4, 5, 6, 9, 11, 15, 19: /mod_base = "2'-O-methyl corresponding base"
  modified_base 21: /mod_base = "5'-thio thymidine"
  modified_base 1, 2, 3, 7, 8, 10, 12, 13, 14, 16, 17, 18: /mod_base = "2'-hydroxy corresponding base"
gagcuuaacauagguaaautt

SEQ ID NO: 798 - DNA, 21 bp, artificial sequence
  siRNA reactive to human Eg5
  5'-terminal nucleic acid is a nucleoside, i.e. base + sugar but lacking 5'-phosphate
  modified_base 4, 8, 13: /mod_base = "2'-O-methyl corresponding base"
  modified_base 21: /mod_base = "5'-thio thymidine"
  modified_base 1, 2, 3, 5, 6, 7, 9, 10, 11, 12, 14, 15, 16, 17, 18, 19: /mod_base = "2'-hydroxy corresponding base"
auuuaccuauguuaagcuctt

SEQ ID NO: 799 - DNA, 21 bp, artificial sequence
  siRNA reactive to human Eg5
  5'-terminal nucleic acid is a nucleoside, i.e. base + sugar but lacking 5'-phosphate
  modified_base 1, 3, 4, 7, 9, 10, 11, 13, 14, 15, 16, 17: /mod_base = "2'-O-methyl corresponding base"
  modified_base 21: /mod_base = "5'-thio thymidine"
  modified_base 2, 5, 6, 8, 12, 18, 19: /mod_base = "2'-hydroxy corresponding base"
caccaacaucuguccuuagtt

SEQ ID NO: 800 - DNA, 21 bp, artificial sequence
  siRNA reactive to human Eg5
  5'-terminal nucleic acid is a nucleoside, i.e. base + sugar but lacking 5'-phosphate
  modified_base 2, 8: /mod_base = "2'-O-methyl corresponding base"
  modified_base 21: /mod_base = "5'-thio thymidine"
  modified_base 1, 3, 4, 5, 6, 7, 9, 10, 11, 12, 13, 14, 15, 16, 17, 18, 19: /mod_base = "2'-hydroxy corresponding base"
cuaaggacagauguuggugtt

SEQ ID NO: 801 - DNA, 21 bp, artificial sequence
  siRNA reactive to human Eg5
  5'-terminal nucleic acid is a nucleoside, i.e. base + sugar but lacking 5'-phosphate
  modified_base 5, 6, 7, 9, 10, 11, 12, 17, 19: /mod_base = "2'-O-methyl corresponding base"
  modified_base 21: /mod_base = "5'-thio thymidine"
  modified_base 1, 2, 3, 4, 8, 13, 14, 15, 16, 18: /mod_base = "2'-hydroxy corresponding base"
aaagcccacuuuagaguautt

SEQ ID NO: 802 - DNA, 21 bp, artificial sequence
  siRNA reactive to human Eg5
  5'-terminal nucleic acid is a nucleoside, i.e. base + sugar but lacking 5'-phosphate
  modified_base 2, 7: /mod_base = "2'-O-methyl corresponding base"
  modified_base 21: /mod_base = "5'-thio thymidine"
  modified_base 1, 3, 4, 5, 6, 8, 9, 10, 11, 12, 13, 14, 15, 16, 17, 18, 19: /mod_base = "2'-hydroxy corresponding base"
auacucuaaagugggcuuutt

SEQ ID NO: 803 - DNA, 21 bp, artificial sequence
  siRNA reactive to human Eg5
  5'-terminal nucleic acid is a nucleoside, i.e. base + sugar but lacking 5'-phosphate
  modified_base 4, 5, 6, 8, 9, 10, 11, 16, 18: /mod_base = "2'-O-methyl corresponding base"
  modified_base 21: /mod_base = "5'-thio thymidine"
  modified_base 1, 2, 3, 7, 12, 13, 14, 15, 17, 19: /mod_base = "2'-hydroxy corresponding base"
aagcccacuuuagaguauatt

SEQ ID NO: 804 - DNA, 21 bp, artificial sequence
  siRNA reactive to human Eg5
  5'-terminal nucleic acid is a nucleoside, i.e. base + sugar but lacking 5'-phosphate
  modified_base 1, 3, 8: /mod_base = "2'-O-methyl corresponding base"
  modified_base 21: /mod_base = "5'-thio thymidine"
  modified_base 2, 4, 5, 6, 7, 9, 10, 11, 12, 13, 14, 15, 16, 17, 18, 19: /mod_base = "2'-hydroxy corresponding base"
uauacucuaaagugggcuutt

SEQ ID NO: 805 - DNA, 21 bp, artificial sequence
  siRNA reactive to human Eg5
  5'-terminal nucleic acid is a nucleoside, i.e. base + sugar but lacking 5'-phosphate
  modified_base 3, 4, 5, 6, 8, 9, 10, 13, 16, 17, 18: /mod_base = "2'-O-methyl corresponding base"
  modified_base 21: /mod_base = "5'-thio thymidine"
  modified_base 1, 2, 7, 11, 12, 14, 15, 19: /mod_base = "2'-hydroxy corresponding base"
gaccuuauuugguaaucugtt

SEQ ID NO: 806 - DNA, 21 bp, artificial sequence
  siRNA reactive to human Eg5
  5'-terminal nucleic acid is a nucleoside, i.e. base + sugar but lacking 5'-phosphate
  modified_base 1, 6, 9, 13: /mod_base = "2'-O-methyl corresponding base"
  modified_base 21: /mod_base = "5'-thio thymidine"
  modified_base 2, 3, 4, 5, 7, 8, 10, 11, 12, 14, 15, 16, 17, 18, 19: /mod_base = "2'-hydroxy corresponding base"
cagauuaccaaauaagguctt

SEQ ID NO: 807 - DNA, 21 bp, artificial sequence
  siRNA reactive to human Eg5
  5'-terminal nucleic acid is a nucleoside, i.e. base + sugar but lacking 5'-phosphate
  modified_base 3, 4, 7, 9, 11, 12, 13, 18, 19: /mod_base = "2'-O-methyl corresponding base"
  modified_base 21: /mod_base = "5'-thio thymidine"
  modified_base 1, 2, 5, 6, 8, 10, 14, 15, 16, 17: /mod_base = "2'-hydroxy corresponding base"
gauuaauguacucaagacutt

SEQ ID NO: 808 - DNA, 21 bp, artificial sequence
  siRNA reactive to human Eg5
  5'-terminal nucleic acid is a nucleoside, i.e. base + sugar but lacking 5'-phosphate
  modified_base 10, 12, 15: /mod_base = "2'-O-methyl corresponding base"
  modified_base 21: /mod_base = "5'-thio thymidine"
  modified_base 1, 2, 3, 4, 5, 6, 7, 8, 9, 11, 13, 14, 16, 17, 18, 19: /mod_base = "2'-hydroxy corresponding base"
agucuugaguacauuaauctt

SEQ ID NO: 809 - DNA, 21 bp, artificial sequence
  siRNA reactive to human Eg5
  5'-terminal nucleic acid is a nucleoside, i.e. base + sugar but lacking 5'-phosphate
  modified_base 1, 2, 3, 4, 11, 12, 13, 16, 17, 18: /mod_base = "2'-O-methyl corresponding base"
  modified_base 21: /mod_base = "5'-thio thymidine"
  modified_base 5, 6, 7, 8, 9, 10, 14, 15, 19: /mod_base = "2'-hydroxy corresponding base"
cuuuaagaggccuaacucatt

SEQ ID NO: 810 - DNA, 21 bp, artificial sequence
  siRNA reactive to human Eg5
  5'-terminal nucleic acid is a nucleoside, i.e. base + sugar but lacking 5'-phosphate
  modified_base 6, 15: /mod_base = "2'-O-methyl corresponding base"
  modified_base 21: /mod_base = "5'-thio thymidine"
  modified_base 1, 2, 3, 4, 5, 7, 8, 9, 10, 11, 12, 13, 14, 16, 17, 18, 19: /mod_base = "2'-hydroxy corresponding base"
ugaguuaggccucuuaaagtt

SEQ ID NO: 811 - DNA, 21 bp, artificial sequence
  siRNA reactive to human Eg5
  5'-terminal nucleic acid is a nucleoside, i.e. base + sugar but lacking 5'-phosphate
  modified_base 1, 2, 6, 7, 11, 12, 13, 14, 16, 17: /mod_base = "2'-O-methyl corresponding base"
  modified_base 21: /mod_base = "5'-thio thymidine"
  modified_base 3, 4, 5, 8, 9, 10, 15, 18, 19: /mod_base = "2'-hydroxy corresponding base"
uuaaaccaaacccuauugatt

SEQ ID NO: 812 - DNA, 21 bp, artificial sequence
  siRNA reactive to human Eg5
  5'-terminal nucleic acid is a nucleoside, i.e. base + sugar but lacking 5'-phosphate
  modified_base 2, 5, 17: /mod_base = "2'-O-methyl corresponding base"
  modified_base 21: /mod_base = "5'-thio thymidine"
  modified_base 1, 3, 4, 6, 7, 8, 9, 10, 11, 12, 13, 14, 15, 16, 18, 19: /mod_base = "2'-hydroxy corresponding base"
ucaauaggguuugguuuaatt

SEQ ID NO: 813 - DNA, 21 bp, artificial sequence
  siRNA reactive to human Eg5
  5'-terminal nucleic acid is a nucleoside, i.e. base + sugar but lacking 5'-phosphate
  modified_base 1, 2, 3, 5, 6, 12, 13, 14, 16, 19: /mod_base = "2'-O-methyl corresponding base"
  modified_base 21: /mod_base = "5'-thio thymidine"
  modified_base 4, 7, 8, 9, 10, 11, 15, 17, 18: /mod_base = "2'-hydroxy corresponding base"
ucuguuggagaucuauaautt

SEQ ID NO: 814 - DNA, 21 bp, artificial sequence
  siRNA reactive to human Eg5
  5'-terminal nucleic acid is a nucleoside, i.e. base + sugar but lacking 5'-phosphate
  modified_base 3, 5, 13, 16: /mod_base = "2'-O-methyl corresponding base"
  modified_base 21: /mod_base = "5'-thio thymidine"
  modified_base 1, 2, 4, 6, 7, 8, 9, 10, 11, 12, 14, 15, 17, 18, 19: /mod_base = "2'-hydroxy corresponding base"
auuauagaucuccaacagatt

SEQ ID NO: 815 - DNA, 21 bp, artificial sequence
  siRNA reactive to human Eg5
  5'-terminal nucleic acid is a nucleoside, i.e. base + sugar but lacking 5'-phosphate
  modified_base 1, 2, 5, 7, 8, 9, 10, 11, 18, 19: /mod_base = "2'-O-methyl corresponding base"
  modified_base 21: /mod_base = "5'-thio thymidine"
  modified_base 3, 4, 6, 12, 13, 14, 15, 16, 17: /mod_base = "2'-hydroxy corresponding base"
cugauguuucugagagacutt

SEQ ID NO: 816 - DNA, 21 bp, artificial sequence
  siRNA reactive to human Eg5
  5'-terminal nucleic acid is a nucleoside, i.e. base + sugar but lacking 5'-phosphate
  modified_base 8, 14, 17: /mod_base = "2'-O-methyl corresponding base"
  modified_base 21: /mod_base = "5'-thio thymidine"
  modified_base 1, 2, 3, 4, 5, 6, 7, 9, 10, 11, 12, 13, 15, 16, 18, 19: /mod_base = "2'-hydroxy corresponding base"
agucucucagaaacaucagtt

SEQ ID NO: 817 - DNA, 21 bp, artificial sequence
  siRNA reactive to human Eg5
  5'-terminal nucleic acid is a nucleoside, i.e. base + sugar but lacking 5'-phosphate
  modified_base 2, 4, 6, 7, 8, 9, 12, 13, 15, 16, 17, 18, 19: /mod_base = "2'-O-methyl corresponding base"
  modified_base 21: /mod_base = "5'-thio thymidine"
  modified_base 1, 3, 5, 10, 11, 14: /mod_base = "2'-hydroxy corresponding base"
gcauacucuagucguuccctt

SEQ ID NO: 818 - DNA, 21 bp, artificial sequence
  siRNA reactive to human Eg5
  5'-terminal nucleic acid is a nucleoside, i.e. base + sugar but lacking 5'-phosphate
  modified_base 10, 15: /mod_base = "2'-O-methyl corresponding base"
  modified_base 21: /mod_base = "5'-thio thymidine"
  modified_base 1, 2, 3, 4, 5, 6, 7, 8, 9, 11, 12, 13, 14, 16, 17, 18, 19: /mod_base = "2'-hydroxy corresponding base"
gggaacgacuagaguaugctt

SEQ ID NO: 819 - DNA, 21 bp, artificial sequence
  siRNA reactive to human Eg5
  5'-terminal nucleic acid is a nucleoside, i.e. base + sugar but lacking 5'-phosphate
  modified_base 2, 3, 4, 5, 6, 7, 9, 10, 16, 17, 18: /mod_base = "2'-O-methyl corresponding base"
  modified_base 21: /mod_base = "5'-thio thymidine"
  modified_base 1, 8, 11, 12, 13, 14, 15, 19: /mod_base = "2'-hydroxy corresponding base"
guuccuuaucgagaaucuatt

SEQ ID NO: 820 - DNA, 21 bp, artificial sequence
  siRNA reactive to human Eg5
  5'-terminal nucleic acid is a nucleoside, i.e. base + sugar but lacking 5'-phosphate
  modified_base 1, 12: /mod_base = "2'-O-methyl corresponding base"
  modified_base 21: /mod_base = "5'-thio thymidine"
  modified_base 2, 3, 4, 5, 6, 7, 8, 9, 10, 11, 13, 14, 15, 16, 17, 18, 19: /mod_base = "2'-hydroxy corresponding base"
uagauucucgauaaggaactt

SEQ ID NO: 821 - DNA, 21 bp, artificial sequence
  siRNA reactive to human Eg5
  5'-terminal nucleic acid is a nucleoside, i.e. base + sugar but lacking 5'-phosphate
  modified_base 2, 4, 5, 6, 10, 11, 12, 13, 14, 15, 17, 19: /mod_base = "2'-O-methyl corresponding base"
  modified_base 21: /mod_base = "5'-thio thymidine"
  modified_base 1, 3, 7, 8, 9, 16, 18: /mod_base = "2'-hydroxy corresponding base"
gcacuuggaucucucacautt

SEQ ID NO: 822 - DNA, 21 bp, artificial sequence
  siRNA reactive to human Eg5
  5'-terminal nucleic acid is a nucleoside, i.e. base + sugar but lacking 5'-phosphate
  modified_base 13: /mod_base = "2'-O-methyl corresponding base"
  modified_base 21: /mod_base = "5'-thio thymidine"
  modified_base 1, 2, 3, 4, 5, 6, 7, 8, 9, 10, 11, 12, 14, 15, 16, 17, 18, 19: /mod_base = "2'-hydroxy corresponding base"
augugagagauccaagugctt

SEQ ID NO: 823 - DNA, 21 bp, artificial sequence
  siRNA reactive to human Eg5
  5'-terminal nucleic acid is a nucleoside, i.e. base + sugar but lacking 5'-phosphate
  modified_base 11, 12, 16, 19: /mod_base = "2'-O-methyl corresponding base"
  modified_base 21: /mod_base = "5'-thio thymidine"
  modified_base 1, 2, 3, 4, 5, 6, 7, 8, 9, 10, 13, 14, 15, 17, 18: /mod_base = "2'-hydroxy corresponding base"
aaaaaaggaacuagauggctt

SEQ ID NO: 824 - DNA, 21 bp, artificial sequence
  siRNA reactive to human Eg5
  5'-terminal nucleic acid is a nucleoside, i.e. base + sugar but lacking 5'-phosphate
  modified_base 3, 7: /mod_base = "2'-O-methyl corresponding base"
  modified_base 21: /mod_base = "5'-thio thymidine"
  modified_base 1, 2, 4, 5, 6, 8, 9, 10, 11, 12, 13, 14, 15, 16, 17, 18, 19: /mod_base = "2'-hydroxy corresponding base"
gccaucuaguuccuuuuuutt

SEQ ID NO: 825 - DNA, 21 bp, artificial sequence
  siRNA reactive to human Eg5
  5'-terminal nucleic acid is a nucleoside, i.e. base + sugar but lacking 5'-phosphate
  modified_base 5, 9, 10, 12, 13, 14, 15, 16, 18: /mod_base = "2'-O-methyl corresponding base"
  modified_base 21: /mod_base = "5'-thio thymidine"
  modified_base 1, 2, 3, 4, 6, 7, 8, 11, 17, 19: /mod_base = "2'-hydroxy corresponding base"
agagcagauuaccucugcgtt

SEQ ID NO: 826 - DNA, 21 bp, artificial sequence
  siRNA reactive to human Eg5
  5'-terminal nucleic acid is a nucleoside, i.e. base + sugar but lacking 5'-phosphate
  modified_base 3, 9: /mod_base = "2'-O-methyl corresponding base"
  modified_base 21: /mod_base = "5'-thio thymidine"
  modified_base 1, 2, 4, 5, 6, 7, 8, 10, 11, 12, 13, 14, 15, 16, 17, 18, 19: /mod_base = "2'-hydroxy corresponding base"
cgcagagguaaucugcucutt

SEQ ID NO: 827 - DNA, 21 bp, artificial sequence
  siRNA reactive to human Eg5
  5'-terminal nucleic acid is a nucleoside, i.e. base + sugar but lacking 5'-phosphate
  modified_base 3, 7, 8, 10, 11, 12, 13, 14, 16: /mod_base = "2'-O-methyl corresponding base"
  modified_base 21: /mod_base = "5'-thio thymidine"
  modified_base 1, 2, 4, 5, 6, 9, 15, 17, 18, 19: /mod_base = "2'-hydroxy corresponding base"
agcagauuaccucugcgagtt

SEQ ID NO: 828 - DNA, 21 bp, artificial sequence
  siRNA reactive to human Eg5
  5'-terminal nucleic acid is a nucleoside, i.e. base + sugar but lacking 5'-phosphate
  modified_base 5, 11: /mod_base = "2'-O-methyl corresponding base"
  modified_base 21: /mod_base = "5'-thio thymidine"
  modified_base 1, 2, 3, 4, 6, 7, 8, 9, 10, 12, 13, 14, 15, 16, 17, 18, 19: /mod_base = "2'-hydroxy corresponding base"
cucgcagagguaaucugcutt

SEQ ID NO: 829 - DNA, 21 bp, artificial sequence
  siRNA reactive to human Eg5
  5'-terminal nucleic acid is a nucleoside, i.e. base + sugar but lacking 5'-phosphate
  modified_base 1, 2, 3, 4, 7, 12, 13, 14, 16: /mod_base = "2'-O-methyl corresponding base"
  modified_base 21: /mod_base = "5'-thio thymidine"
  modified_base 5, 6, 8, 9, 10, 11, 15, 17, 18, 19: /mod_base = "2'-hydroxy corresponding base"
cccugacagaguucacaaatt

SEQ ID NO: 830 - DNA, 21 bp, artificial sequence
  siRNA reactive to human Eg5
  5'-terminal nucleic acid is a nucleoside, i.e. base + sugar but lacking 5'-phosphate
  modified_base 15: /mod_base = "2'-O-methyl corresponding base"
  modified_base 21: /mod_base = "5'-thio thymidine"
  modified_base 1, 2, 3, 4, 5, 6, 7, 8, 9, 10, 11, 12, 13, 14, 16, 17, 18, 19: /mod_base = "2'-hydroxy corresponding base"
uuugugaacucugucagggtt

SEQ ID NO: 831 - DNA, 21 bp, artificial sequence
  siRNA reactive to human Eg5
  5'-terminal nucleic acid is a nucleoside, i.e. base + sugar but lacking 5'-phosphate
  modified_base 2, 3, 4, 6, 7, 12, 14, 15, 17, 18, 19: /mod_base = "2'-O-methyl corresponding base"
  modified_base 21: /mod_base = "5'-thio thymidine"
  modified_base 1, 5, 8, 9, 10, 11, 13, 16: /mod_base = "2'-hydroxy corresponding base"
guuuaccgaaguguuguuutt

SEQ ID NO: 832 - DNA, 21 bp, artificial sequence
  siRNA reactive to human Eg5
  5'-terminal nucleic acid is a nucleoside, i.e. base + sugar but lacking 5'-phosphate
  modified_base 4, 7, 15: /mod_base = "2'-O-methyl corresponding base"
  modified_base 21: /mod_base = "5'-thio thymidine"
  modified_base 1, 2, 3, 5, 6, 8, 9, 10, 11, 12, 13, 14, 16, 17, 18, 19: /mod_base = "2'-hydroxy corresponding base"
aaacaacacuucgguaaactt

SEQ ID NO: 833 - DNA, 21 bp, artificial sequence
  siRNA reactive to human Eg5
  5'-terminal nucleic acid is a nucleoside, i.e. base + sugar but lacking 5'-phosphate
  modified_base 1, 2, 4, 7, 9, 11, 14: /mod_base = "2'-O-methyl corresponding base"
  modified_base 21: /mod_base = "5'-thio thymidine"
  modified_base 3, 5, 6, 8, 10, 12, 13, 15, 16, 17, 18, 19: /mod_base = "2'-hydroxy corresponding base"
uuacaguacacaacaaggatt

SEQ ID NO: 834 - DNA, 21 bp, artificial sequence
  siRNA reactive to human Eg5
  5'-terminal nucleic acid is a nucleoside, i.e. base + sugar but lacking 5'-phosphate
  modified_base 12, 17: /mod_base = "2'-O-methyl corresponding base"
  modified_base 21: /mod_base = "5'-thio thymidine"
  modified_base 1, 2, 3, 4, 5, 6, 7, 8, 9, 10, 11, 13, 14, 15, 16, 18, 19: /mod_base = "2'-hydroxy corresponding base"
uccuuguuguguacuguaatt

SEQ ID NO: 835 - DNA, 21 bp, artificial sequence
  siRNA reactive to human Eg5
  5'-terminal nucleic acid is a nucleoside, i.e. base + sugar but lacking 5'-phosphate
  modified_base 2, 3, 7, 8, 10, 18: /mod_base = "2'-O-methyl corresponding base"
  modified_base 21: /mod_base = "5'-thio thymidine"
  modified_base 1, 4, 5, 6, 9, 11, 12, 13, 14, 15, 16, 17, 19: /mod_base = "2'-hydroxy corresponding base"
acuggaucguaagaaggcatt

SEQ ID NO: 836 - DNA, 21 bp, artificial sequence
  siRNA reactive to human Eg5
  5'-terminal nucleic acid is a nucleoside, i.e. base + sugar but lacking 5'-phosphate
  modified_base 9, 16: /mod_base = "2'-O-methyl corresponding base"
  modified_base 21: /mod_base = "5'-thio thymidine"
  modified_base 1, 2, 3, 4, 5, 6, 7, 8, 10, 11, 12, 13, 14, 15, 17, 18, 19: /mod_base = "2'-hydroxy corresponding base"
ugccuucuuacgauccagutt

SEQ ID NO: 837 - DNA, 21 bp, artificial sequence
  siRNA reactive to human Eg5
  5'-terminal nucleic acid is a nucleoside, i.e. base + sugar but lacking 5'-phosphate
  modified_base 4, 8, 9, 11, 12, 13, 14, 15, 17: /mod_base = "2'-O-methyl corresponding base"
  modified_base 21: /mod_base = "5'-thio thymidine"
  modified_base 1, 2, 3, 5, 6, 7, 10, 16, 18, 19: /mod_base = "2'-hydroxy corresponding base"
gagcagauuaccucugcgatt

SEQ ID NO: 838 - DNA, 21 bp, artificial sequence
  siRNA reactive to human Eg5
  5'-terminal nucleic acid is a nucleoside, i.e. base + sugar but lacking 5'-phosphate
  modified_base 4, 10: /mod_base = "2'-O-methyl corresponding base"
  modified_base 21: /mod_base = "5'-thio thymidine"
  modified_base 1, 2, 3, 5, 6, 7, 8, 9, 11, 12, 13, 14, 15, 16, 17, 18, 19: /mod_base = "2'-hydroxy corresponding base"
ucgcagagguaaucugcuctt

SEQ ID NO: 839 - DNA, 21 bp, artificial sequence
  siRNA reactive to human Eg5
  5'-terminal nucleic acid is a nucleoside, i.e. base + sugar but lacking 5'-phosphate
  modified_base 9, 10, 13, 15, 17: /mod_base = "2'-O-methyl corresponding base"
  modified_base 21: /mod_base = "5'-thio thymidine"
  modified_base 1, 2, 3, 4, 5, 6, 7, 8, 11, 12, 14, 16, 18, 19: /mod_base = "2'-hydroxy corresponding base"
aaaagaaguuaguguacgatt

SEQ ID NO: 840 - DNA, 21 bp, artificial sequence
  siRNA reactive to human Eg5
  5'-terminal nucleic acid is a nucleoside, i.e. base + sugar but lacking 5'-phosphate
  modified_base 4, 6, 9: /mod_base = "2'-O-methyl corresponding base"
  modified_base 21: /mod_base = "5'-thio thymidine"
  modified_base 1, 2, 3, 5, 7, 8, 10, 11, 12, 13, 14, 15, 16, 17, 18, 19: /mod_base = "2'-hydroxy corresponding base"
ucguacacuaacuucuuuutt

SEQ ID NO: 841 - DNA, 21 bp, artificial sequence
  siRNA reactive to human Eg5
  5'-terminal nucleic acid is a nucleoside, i.e. base + sugar but lacking 5'-phosphate
  modified_base 3, 4, 6, 7, 8, 11, 12, 13, 16: /mod_base = "2'-O-methyl corresponding base"
  modified_base 21: /mod_base = "5'-thio thymidine"
  modified_base 1, 2, 5, 9, 10, 14, 15, 17, 18, 19: /mod_base = "2'-hydroxy corresponding base"
gaccauuuaauuuggcagatt

SEQ ID NO: 842 - DNA, 21 bp, artificial sequence
  siRNA reactive to human Eg5
  5'-terminal nucleic acid is a nucleoside, i.e. base + sugar but lacking 5'-phosphate
  modified_base 6, 11: /mod_base = "2'-O-methyl corresponding base"
  modified_base 21: /mod_base = "5'-thio thymidine"
  modified_base 1, 2, 3, 4, 5, 7, 8, 9, 10, 12, 13, 14, 15, 16, 17, 18, 19: /mod_base = "2'-hydroxy corresponding base"
ucugccaaauuaaaugguctt

SEQ ID NO: 843 - DNA, 21 bp, artificial sequence
  siRNA reactive to human Eg5
  5'-terminal nucleic acid is a nucleoside, i.e. base + sugar but lacking 5'-phosphate
  modified_base 9, 12, 15, 16: /mod_base = "2'-O-methyl corresponding base"
  modified_base 21: /mod_base = "5'-thio thymidine"
  modified_base 1, 2, 3, 4, 5, 6, 7, 8, 10, 11, 13, 14, 17, 18, 19: /mod_base = "2'-hydroxy corresponding base"
gagaggagugauaauuaaatt

SEQ ID NO: 844 - DNA, 21 bp, artificial sequence
  siRNA reactive to human Eg5
  5'-terminal nucleic acid is a nucleoside, i.e. base + sugar but lacking 5'-phosphate
  modified_base 3, 7, 10: /mod_base = "2'-O-methyl corresponding base"
  modified_base 21: /mod_base = "5'-thio thymidine"
  modified_base 1, 2, 4, 5, 6, 8, 9, 11, 12, 13, 14, 15, 16, 17, 18, 19: /mod_base = "2'-hydroxy corresponding base"
uuuaauuaucacuccucuctt

SEQ ID NO: 845 - DNA, 21 bp, artificial sequence
  siRNA reactive to human Eg5
  5'-terminal nucleic acid is a nucleoside, i.e. base + sugar but lacking 5'-phosphate
  modified_base 1, 2, 9, 10, 13, 14, 17: /mod_base = "2'-O-methyl corresponding base"
  modified_base 21: /mod_base = "5'-thio thymidine"
  modified_base 3, 4, 5, 6, 7, 8, 11, 12, 15, 16, 18, 19: /mod_base = "2'-hydroxy corresponding base"
cuggaggauuggcugacaatt

SEQ ID NO: 846 - DNA, 21 bp, artificial sequence
  siRNA reactive to human Eg5
  5'-terminal nucleic acid is a nucleoside, i.e. base + sugar but lacking 5'-phosphate
  modified_base 5, 9, 17: /mod_base = "2'-O-methyl corresponding base"
  modified_base 21: /mod_base = "5'-thio thymidine"
  modified_base 1, 2, 3, 4, 6, 7, 8, 10, 11, 12, 13, 14, 15, 16, 18, 19: /mod_base = "2'-hydroxy corresponding base"
uugucagccaauccuccagtt

SEQ ID NO: 847 - DNA, 21 bp, artificial sequence
  siRNA reactive to human Eg5
  5'-terminal nucleic acid is a nucleoside, i.e. base + sugar but lacking 5'-phosphate
  modified_base 1, 2, 3, 4, 7, 8, 10, 11, 12, 13, 14, 16, 17, 18: /mod_base = "2'-O-methyl corresponding base"
  modified_base 21: /mod_base = "5'-thio thymidine"
  modified_base 5, 6, 9, 15, 19: /mod_base = "2'-hydroxy corresponding base"
cucuagucguucccacucatt

SEQ ID NO: 848 - DNA, 21 bp, artificial sequence
  siRNA reactive to human Eg5
  5'-terminal nucleic acid is a nucleoside, i.e. base + sugar but lacking 5'-phosphate
  modified_base 15: /mod_base = "2'-O-methyl corresponding base"
  modified_base 21: /mod_base = "5'-thio thymidine"
  modified_base 1, 2, 3, 4, 5, 6, 7, 8, 9, 10, 11, 12, 13, 14, 16, 17, 18, 19: /mod_base = "2'-hydroxy corresponding base"
ugagugggaacgacuagagtt

SEQ ID NO: 849 - DNA, 21 bp, artificial sequence
  siRNA reactive to human Eg5
  5'-terminal nucleic acid is a nucleoside, i.e. base + sugar but lacking 5'-phosphate
  modified_base 3, 5, 6, 8, 9, 11, 12, 14, 17: /mod_base = "2'-O-methyl corresponding base"
  modified_base 21: /mod_base = "5'-thio thymidine"
  modified_base 1, 2, 4, 7, 10, 13, 15, 16, 18, 19: /mod_base = "2'-hydroxy corresponding base"
gauaccauuacuacaguagtt

SEQ ID NO: 850 - DNA, 21 bp, artificial sequence
  siRNA reactive to human Eg5
  5'-terminal nucleic acid is a nucleoside, i.e. base + sugar but lacking 5'-phosphate
  modified_base 2, 7, 10, 16: /mod_base = "2'-O-methyl corresponding base"
  modified_base 21: /mod_base = "5'-thio thymidine"
  modified_base 1, 3, 4, 5, 6, 8, 9, 11, 12, 13, 14, 15, 17, 18, 19: /mod_base = "2'-hydroxy corresponding base"
cuacuguaguaaugguauctt

SEQ ID NO: 851 - DNA, 21 bp, artificial sequence
  siRNA reactive to human Eg5
  5'-terminal nucleic acid is a nucleoside, i.e. base + sugar but lacking 5'-phosphate
  modified_base 1, 2, 3, 5, 6, 7, 9: /mod_base = "2'-O-methyl corresponding base"
  modified_base 21: /mod_base = "5'-thio thymidine"
  modified_base 4, 8, 10, 11, 12, 13, 14, 15, 16, 17, 18, 19: /mod_base = "2'-hydroxy corresponding base"
uucgucugcgaagaagaaatt

SEQ ID NO: 852 - DNA, 21 bp, artificial sequence
  siRNA reactive to human Eg5
  5'-terminal nucleic acid is a nucleoside, i.e. base + sugar but lacking 5'-phosphate
  modified_base 12: /mod_base = "2'-O-methyl corresponding base"
  modified_base 21: /mod_base = "5'-thio thymidine"
  modified_base 1, 2, 3, 4, 5, 6, 7, 8, 9, 10, 11, 13, 14, 15, 16, 17, 18, 19: /mod_base = "2'-hydroxy corresponding base"
uuucuucuucgcagacgaatt

SEQ ID NO: 853 - DNA, 21 bp, artificial sequence
  siRNA reactive to human Eg5
  5'-terminal nucleic acid is a nucleoside, i.e. base + sugar but lacking 5'-phosphate
  modified_base 10, 11, 14, 16, 18: /mod_base = "2'-O-methyl corresponding base"
  modified_base 21: /mod_base = "5'-thio thymidine"
  modified_base 1, 2, 3, 4, 5, 6, 7, 8, 9, 12, 13, 15, 17, 19: /mod_base = "2'-hydroxy corresponding base"
gaaaagaaguuaguguacgtt

SEQ ID NO: 854 - DNA, 21 bp, artificial sequence
  siRNA reactive to human Eg5
  5'-terminal nucleic acid is a nucleoside, i.e. base + sugar but lacking 5'-phosphate
  modified_base 3, 5, 8: /mod_base = "2'-O-methyl corresponding base"
  modified_base 21: /mod_base = "5'-thio thymidine"
  modified_base 1, 2, 4, 6, 7, 9, 10, 11, 12, 13, 14, 15, 16, 17, 18, 19: /mod_base = "2'-hydroxy corresponding base"
cguacacuaacuucuuuuctt

SEQ ID NO: 855 - DNA, 21 bp, artificial sequence
  siRNA reactive to human Eg5
  5'-terminal nucleic acid is a nucleoside, i.e. base + sugar but lacking 5'-phosphate
  modified_base 1, 4, 6, 7, 8, 10, 11, 16, 18, 19: /mod_base = "2'-O-methyl corresponding base"
  modified_base 21: /mod_base = "5'-thio thymidine"
  modified_base 2, 3, 5, 9, 12, 13, 14, 15, 17: /mod_base = "2'-hydroxy corresponding base"
ugauguuuaccgaaguguutt

SEQ ID NO: 856 - DNA, 21 bp, artificial sequence
  siRNA reactive to human Eg5
  5'-terminal nucleic acid is a nucleoside, i.e. base + sugar but lacking 5'-phosphate
  modified_base 3, 11, 15, 18: /mod_base = "2'-O-methyl corresponding base"
  modified_base 21: /mod_base = "5'-thio thymidine"
  modified_base 1, 2, 4, 5, 6, 7, 8, 9, 10, 12, 13, 14, 16, 17, 19: /mod_base = "2'-hydroxy corresponding base"
aacacuucgguaaacaucatt

SEQ ID NO: 857 - DNA, 21 bp, artificial sequence
  siRNA reactive to human Eg5
  5'-terminal nucleic acid is a nucleoside, i.e. base + sugar but lacking 5'-phosphate
  modified_base 1, 3, 4, 5, 7, 8, 9, 12, 13, 14, 15, 19: /mod_base = "2'-O-methyl corresponding base"
  modified_base 21: /mod_base = "5'-thio thymidine"
  modified_base 2, 6, 10, 11, 16, 17, 18: /mod_base = "2'-hydroxy corresponding base"
uguuuguccaauucuggautt

SEQ ID NO: 858 - DNA, 21 bp, artificial sequence
  siRNA reactive to human Eg5
  5'-terminal nucleic acid is a nucleoside, i.e. base + sugar but lacking 5'-phosphate
  modified_base 4, 14, 18: /mod_base = "2'-O-methyl corresponding base"
  modified_base 21: /mod_base = "5'-thio thymidine"
  modified_base 1, 2, 3, 5, 6, 7, 8, 9, 10, 11, 12, 13, 15, 16, 17, 19: /mod_base = "2'-hydroxy corresponding base"
auccagaauuggacaaacatt

SEQ ID NO: 859 - DNA, 21 bp, artificial sequence
  siRNA reactive to human Eg5
  5'-terminal nucleic acid is a nucleoside, i.e. base + sugar but lacking 5'-phosphate
  modified_base 2, 9, 11, 13, 14, 15: /mod_base = "2'-O-methyl corresponding base"
  modified_base 21: /mod_base = "5'-thio thymidine"
  modified_base 1, 3, 4, 5, 6, 7, 8, 10, 12, 16, 17, 18, 19: /mod_base = "2'-hydroxy corresponding base"
augaagaguauaccugggatt

SEQ ID NO: 860 - DNA, 21 bp, artificial sequence
  siRNA reactive to human Eg5
  5'-terminal nucleic acid is a nucleoside, i.e. base + sugar but lacking 5'-phosphate
  modified_base 4, 8, 10, 17: /mod_base = "2'-O-methyl corresponding base"
  modified_base 21: /mod_base = "5'-thio thymidine"
  modified_base 1, 2, 3, 5, 6, 7, 9, 11, 12, 13, 14, 15, 16, 18, 19: /mod_base = "2'-hydroxy corresponding base"
ucccagguauacucuucautt

SEQ ID NO: 861 - DNA, 21 bp, artificial sequence
  siRNA reactive to human Eg5
  5'-terminal nucleic acid is a nucleoside, i.e. base + sugar but lacking 5'-phosphate
  modified_base 2, 3, 5, 6, 7, 8, 11, 15, 17, 19: /mod_base = "2'-O-methyl corresponding base"
  modified_base 21: /mod_base = "5'-thio thymidine"
  modified_base 1, 4, 9, 10, 12, 13, 14, 16, 18: /mod_base = "2'-hydroxy corresponding base"
gcuacucugaugaaugcautt

SEQ ID NO: 862 - DNA, 21 bp, artificial sequence
  siRNA reactive to human Eg5
  5'-terminal nucleic acid is a nucleoside, i.e. base + sugar but lacking 5'-phosphate
  modified_base 4, 8, 11, 16: /mod_base = "2'-O-methyl corresponding base"
  modified_base 21: /mod_base = "5'-thio thymidine"
  modified_base 1, 2, 3, 5, 6, 7, 9, 10, 12, 13, 14, 15, 17, 18, 19: /mod_base = "2'-hydroxy corresponding base"
augcauucaucagaguagctt

SEQ ID NO: 863 - DNA, 21 bp, artificial sequence
  siRNA reactive to human Eg5
  5'-terminal nucleic acid is a nucleoside, i.e. base + sugar but lacking 5'-phosphate
  modified_base 2, 3, 4, 5, 6, 8, 17, 19: /mod_base = "2'-O-methyl corresponding base"
  modified_base 21: /mod_base = "5'-thio thymidine"
  modified_base 1, 7, 9, 10, 11, 12, 13, 14, 15, 16, 18: /mod_base = "2'-hydroxy corresponding base"
gcccuuguagaaagaacactt

SEQ ID NO: 864 - DNA, 21 bp, artificial sequence
  siRNA reactive to human Eg5
  5'-terminal nucleic acid is a nucleoside, i.e. base + sugar but lacking 5'-phosphate
  modified_base 11, 13: /mod_base = "2'-O-methyl corresponding base"
  modified_base 21: /mod_base = "5'-thio thymidine"
  modified_base 1, 2, 3, 4, 5, 6, 7, 8, 9, 10, 12, 14, 15, 16, 17, 18, 19: /mod_base = "2'-hydroxy corresponding base"
guguucuuucuacaagggctt

SEQ ID NO: 865 - DNA, 21 bp, artificial sequence
  siRNA reactive to human Eg5
  5'-terminal nucleic acid is a nucleoside, i.e. base + sugar but lacking 5'-phosphate
  modified_base 1, 2, 4, 6, 7, 8, 9, 10, 11, 13, 14: /mod_base = "2'-O-methyl corresponding base"
  modified_base 21: /mod_base = "5'-thio thymidine"
  modified_base 3, 5, 12, 15, 16, 17, 18, 19: /mod_base = "2'-hydroxy corresponding base"
ucauguuccuuaucgagaatt

SEQ ID NO: 866 - DNA, 21 bp, artificial sequence
  siRNA reactive to human Eg5
  5'-terminal nucleic acid is a nucleoside, i.e. base + sugar but lacking 5'-phosphate
  modified_base 8, 15: /mod_base = "2'-O-methyl corresponding base"
  modified_base 21: /mod_base = "5'-thio thymidine"
  modified_base 1, 2, 3, 4, 5, 6, 7, 9, 10, 11, 12, 13, 14, 16, 17, 18, 19: /mod_base = "2'-hydroxy corresponding base"
uucucgauaaggaacaugatt

SEQ ID NO: 867 - DNA, 21 bp, artificial sequence
  siRNA reactive to human Eg5
  5'-terminal nucleic acid is a nucleoside, i.e. base + sugar but lacking 5'-phosphate
  modified_base 4, 9, 10, 12, 17, 18: /mod_base = "2'-O-methyl corresponding base"
  modified_base 21: /mod_base = "5'-thio thymidine"
  modified_base 1, 2, 3, 5, 6, 7, 8, 11, 13, 14, 15, 16, 19: /mod_base = "2'-hydroxy corresponding base"
gaauaggguuacagaguugtt

SEQ ID NO: 868 - DNA, 21 bp, artificial sequence
  siRNA reactive to human Eg5
  5'-terminal nucleic acid is a nucleoside, i.e. base + sugar but lacking 5'-phosphate
  modified_base 1, 9, 15: /mod_base = "2'-O-methyl corresponding base"
  modified_base 21: /mod_base = "5'-thio thymidine"
  modified_base 2, 3, 4, 5, 6, 7, 8, 10, 11, 12, 13, 14, 16, 17, 18, 19: /mod_base = "2'-hydroxy corresponding base"
caacucuguaacccuauuctt

SEQ ID NO: 869 - DNA, 21 bp, artificial sequence
  siRNA reactive to human Eg5
  5'-terminal nucleic acid is a nucleoside, i.e. base + sugar but lacking 5'-phosphate
  modified_base 1, 5, 6, 10, 11, 13: /mod_base = "2'-O-methyl corresponding base"
  modified_base 21: /mod_base = "5'-thio thymidine"
  modified_base 2, 3, 4, 7, 8, 9, 12, 14, 15, 16, 17, 18, 19: /mod_base = "2'-hydroxy corresponding base"
caaacuggaucguaagaagtt

SEQ ID NO: 870 - DNA, 21 bp, artificial sequence
  siRNA reactive to human Eg5
  5'-terminal nucleic acid is a nucleoside, i.e. base + sugar but lacking 5'-phosphate
  modified_base 6, 13: /mod_base = "2'-O-methyl corresponding base"
  modified_base 21: /mod_base = "5'-thio thymidine"
  modified_base 1, 2, 3, 4, 5, 7, 8, 9, 10, 11, 12, 14, 15, 16, 17, 18, 19: /mod_base = "2'-hydroxy corresponding base"
cuucuuacgauccaguuugtt

SEQ ID NO: 871 - DNA, 21 bp, artificial sequence
  siRNA reactive to human Eg5
  5'-terminal nucleic acid is a nucleoside, i.e. base + sugar but lacking 5'-phosphate
  modified_base 1, 2, 3, 5, 6, 7, 10, 13, 14, 15, 17, 18: /mod_base = "2'-O-methyl corresponding base"
  modified_base 21: /mod_base = "5'-thio thymidine"
  modified_base 4, 8, 9, 11, 12, 16, 19: /mod_base = "2'-hydroxy corresponding base"
cuuauuugguaaucugcugtt

SEQ ID NO: 872 - DNA, 21 bp, artificial sequence
  siRNA reactive to human Eg5
  5'-terminal nucleic acid is a nucleoside, i.e. base + sugar but lacking 5'-phosphate
  modified_base 1, 4, 9, 12, 16: /mod_base = "2'-O-methyl corresponding base"
  modified_base 21: /mod_base = "5'-thio thymidine"
  modified_base 2, 3, 5, 6, 7, 8, 10, 11, 13, 14, 15, 17, 18, 19: /mod_base = "2'-hydroxy corresponding base"
cagcagauuaccaaauaagtt

SEQ ID NO: 873 - DNA, 21 bp, artificial sequence
  siRNA reactive to human Eg5
  5'-terminal nucleic acid is a nucleoside, i.e. base + sugar but lacking 5'-phosphate
  modified_base 3, 6, 8, 14, 15, 16, 19: /mod_base = "2'-O-methyl corresponding base"
  modified_base 21: /mod_base = "5'-thio thymidine"
  modified_base 1, 2, 4, 5, 7, 9, 10, 11, 12, 13, 17, 18: /mod_base = "2'-hydroxy corresponding base"
agcaauguggaaaccuaactt

SEQ ID NO: 874 - DNA, 21 bp, artificial sequence
  siRNA reactive to human Eg5
  5'-terminal nucleic acid is a nucleoside, i.e. base + sugar but lacking 5'-phosphate
  modified_base 3, 11, 13: /mod_base = "2'-O-methyl corresponding base"
  modified_base 21: /mod_base = "5'-thio thymidine"
  modified_base 1, 2, 4, 5, 6, 7, 8, 9, 10, 12, 14, 15, 16, 17, 18, 19: /mod_base = "2'-hydroxy corresponding base"
guuagguuuccacauugcutt

SEQ ID NO: 875 - DNA, 21 bp, artificial sequence
  siRNA reactive to human Eg5
  5'-terminal nucleic acid is a nucleoside, i.e. base + sugar but lacking 5'-phosphate
  modified_base 2, 5, 10, 14, 15, 16, 18, 19: /mod_base = "2'-O-methyl corresponding base"
  modified_base 21: /mod_base = "5'-thio thymidine"
  modified_base 1, 3, 4, 6, 7, 8, 9, 11, 12, 13, 17: /mod_base = "2'-hydroxy corresponding base"
acaauaaagcagacccauutt

SEQ ID NO: 876 - DNA, 21 bp, artificial sequence
  siRNA reactive to human Eg5
  5'-terminal nucleic acid is a nucleoside, i.e. base + sugar but lacking 5'-phosphate
  modified_base 14: /mod_base = "2'-O-methyl corresponding base"
  modified_base 21: /mod_base = "5'-thio thymidine"
  modified_base 1, 2, 3, 4, 5, 6, 7, 8, 9, 10, 11, 12, 13, 15, 16, 17, 18, 19: /mod_base = "2'-hydroxy corresponding base"
aaugggucugcuuuauugutt

SEQ ID NO: 877 - DNA, 21 bp, artificial sequence
  siRNA reactive to human Eg5
  5'-terminal nucleic acid is a nucleoside, i.e. base + sugar but lacking 5'-phosphate
  modified_base 3, 4, 6, 7, 8, 11, 14, 16, 17, 18: /mod_base = "2'-O-methyl corresponding base"
  modified_base 21: /mod_base = "5'-thio thymidine"
  modified_base 1, 2, 5, 9, 10, 12, 13, 15, 19: /mod_base = "2'-hydroxy corresponding base"
aaccacuuaguaguguccatt

SEQ ID NO: 878 - DNA, 21 bp, artificial sequence
  siRNA reactive to human Eg5
  5'-terminal nucleic acid is a nucleoside, i.e. base + sugar but lacking 5'-phosphate
  modified_base 5, 8, 11: /mod_base = "2'-O-methyl corresponding base"
  modified_base 21: /mod_base = "5'-thio thymidine"
  modified_base 1, 2, 3, 4, 6, 7, 9, 10, 12, 13, 14, 15, 16, 17, 18, 19: /mod_base = "2'-hydroxy corresponding base"
uggacacuacuaagugguutt

SEQ ID NO: 879 - DNA, 21 bp, artificial sequence
  siRNA reactive to human Eg5
  5'-terminal nucleic acid is a nucleoside, i.e. base + sugar but lacking 5'-phosphate
  modified_base 3, 4, 10, 11, 13, 14, 15, 17: /mod_base = "2'-O-methyl corresponding base"
  modified_base 21: /mod_base = "5'-thio thymidine"
  modified_base 1, 2, 5, 6, 7, 8, 9, 12, 16, 18, 19: /mod_base = "2'-hydroxy corresponding base"
agucaagagccaucuguagtt

SEQ ID NO: 880 - DNA, 21 bp, artificial sequence
  siRNA reactive to human Eg5
  5'-terminal nucleic acid is a nucleoside, i.e. base + sugar but lacking 5'-phosphate
  modified_base 2, 4: /mod_base = "2'-O-methyl corresponding base"
  modified_base 21: /mod_base = "5'-thio thymidine"
  modified_base 1, 3, 5, 6, 7, 8, 9, 10, 11, 12, 13, 14, 15, 16, 17, 18, 19: /mod_base = "2'-hydroxy corresponding base"
cuacagauggcucuugacutt

SEQ ID NO: 881 - DNA, 21 bp, artificial sequence
  siRNA reactive to human Eg5
  5'-terminal nucleic acid is a nucleoside, i.e. base + sugar but lacking 5'-phosphate
  modified_base 1, 2, 3, 4, 5, 6, 10, 11, 12, 13, 14, 15, 16, 18, 19: /mod_base = "2'-O-methyl corresponding base"
  modified_base 21: /mod_base = "5'-thio thymidine"
  modified_base 7, 8, 9, 17: /mod_base = "2'-hydroxy corresponding base"
cucccuagacuucccuauutt

SEQ ID NO: 882 - DNA, 21 bp, artificial sequence
  siRNA reactive to human Eg5
  5'-terminal nucleic acid is a nucleoside, i.e. base + sugar but lacking 5'-phosphate
  modified_base 3, 13: /mod_base = "2'-O-methyl corresponding base"
  modified_base 21: /mod_base = "5'-thio thymidine"
  modified_base 1, 2, 4, 5, 6, 7, 8, 9, 10, 11, 12, 14, 15, 16, 17, 18, 19: /mod_base = "2'-hydroxy corresponding base"
aauagggaagucuagggagtt

SEQ ID NO: 883 - DNA, 21 bp, artificial sequence
  siRNA reactive to human Eg5
  5'-terminal nucleic acid is a nucleoside, i.e. base + sugar but lacking 5'-phosphate
  modified_base 2, 5, 6, 10, 11, 15, 16: /mod_base = "2'-O-methyl corresponding base"
  modified_base 21: /mod_base = "5'-thio thymidine"
  modified_base 1, 3, 4, 7, 8, 9, 12, 13, 14, 17, 18, 19: /mod_base = "2'-hydroxy corresponding base"
auagcuaaauuaaaccaaatt

SEQ ID NO: 884 - DNA, 21 bp, artificial sequence
  siRNA reactive to human Eg5
  5'-terminal nucleic acid is a nucleoside, i.e. base + sugar but lacking 5'-phosphate
  modified_base 8, 13, 17: /mod_base = "2'-O-methyl corresponding base"
  modified_base 21: /mod_base = "5'-thio thymidine"
  modified_base 1, 2, 3, 4, 5, 6, 7, 9, 10, 11, 12, 14, 15, 16, 18, 19: /mod_base = "2'-hydroxy corresponding base"
uuugguuuaauuuagcuautt

SEQ ID NO: 885 - DNA, 21 bp, artificial sequence
  siRNA reactive to human Eg5
  5'-terminal nucleic acid is a nucleoside, i.e. base + sugar but lacking 5'-phosphate
  modified_base 1, 4, 5, 8, 10, 13, 14, 15, 16, 18: /mod_base = "2'-O-methyl corresponding base"
  modified_base 21: /mod_base = "5'-thio thymidine"
  modified_base 2, 3, 6, 7, 9, 11, 12, 17, 19: /mod_base = "2'-hydroxy corresponding base"
uggcugguauaauuccacgtt

SEQ ID NO: 886 - DNA, 21 bp, artificial sequence
  siRNA reactive to human Eg5
  5'-terminal nucleic acid is a nucleoside, i.e. base + sugar but lacking 5'-phosphate
  modified_base 9, 11, 14, 18: /mod_base = "2'-O-methyl corresponding base"
  modified_base 21: /mod_base = "5'-thio thymidine"
  modified_base 1, 2, 3, 4, 5, 6, 7, 8, 10, 12, 13, 15, 16, 17, 19: /mod_base = "2'-hydroxy corresponding base"
cguggaauuauaccagccatt

SEQ ID NO: 887 - DNA, 21 bp, artificial sequence
  siRNA reactive to human Eg5
  5'-terminal nucleic acid is a nucleoside, i.e. base + sugar but lacking 5'-phosphate
  modified_base 1, 2, 4, 5, 6, 9, 12, 13, 14, 16, 17, 19: /mod_base = "2'-O-methyl corresponding base"
  modified_base 21: /mod_base = "5'-thio thymidine"
  modified_base 3, 7, 8, 10, 11, 15, 18: /mod_base = "2'-hydroxy corresponding base"
uuauuugguaaucugcugutt

SEQ ID NO: 888 - DNA, 21 bp, artificial sequence
  siRNA reactive to human Eg5
  5'-terminal nucleic acid is a nucleoside, i.e. base + sugar but lacking 5'-phosphate
  modified_base 2, 5, 10, 13, 17: /mod_base = "2'-O-methyl corresponding base"
  modified_base 21: /mod_base = "5'-thio thymidine"
  modified_base 1, 3, 4, 6, 7, 8, 9, 11, 12, 14, 15, 16, 18, 19: /mod_base = "2'-hydroxy corresponding base"
acagcagauuaccaaauaatt

SEQ ID NO: 889 - DNA, 21 bp, artificial sequence
  siRNA reactive to human Eg5
  5'-terminal nucleic acid is a nucleoside, i.e. base + sugar but lacking 5'-phosphate
  modified_base 3, 4, 8, 11, 12, 13, 14, 15, 16, 17: /mod_base = "2'-O-methyl corresponding base"
  modified_base 21: /mod_base = "5'-thio thymidine"
  modified_base 1, 2, 5, 6, 7, 9, 10, 18, 19: /mod_base = "2'-hydroxy corresponding base"
aacuagauggcuuucucagtt

SEQ ID NO: 890 - DNA, 21 bp, artificial sequence
  siRNA reactive to human Eg5
  5'-terminal nucleic acid is a nucleoside, i.e. base + sugar but lacking 5'-phosphate
  modified_base 11, 15: /mod_base = "2'-O-methyl corresponding base"
  modified_base 21: /mod_base = "5'-thio thymidine"
  modified_base 1, 2, 3, 4, 5, 6, 7, 8, 9, 10, 12, 13, 14, 16, 17, 18, 19: /mod_base = "2'-hydroxy corresponding base"
cugagaaagccaucuaguutt

SEQ ID NO: 891 - DNA, 21 bp, artificial sequence
  siRNA reactive to human Eg5
  5'-terminal nucleic acid is a nucleoside, i.e. base + sugar but lacking 5'-phosphate
  modified_base 1, 2, 4, 7, 9, 10, 12, 15, 16: /mod_base = "2'-O-methyl corresponding base"
  modified_base 21: /mod_base = "5'-thio thymidine"
  modified_base 3, 5, 6, 8, 11, 13, 14, 17, 18, 19: /mod_base = "2'-hydroxy corresponding base"
ucauggcgucgcagccaaatt

SEQ ID NO: 892 - DNA, 21 bp, artificial sequence
  siRNA reactive to human Eg5
  5'-terminal nucleic acid is a nucleoside, i.e. base + sugar but lacking 5'-phosphate
  modified_base 15: /mod_base = "2'-O-methyl corresponding base"
  modified_base 21: /mod_base = "5'-thio thymidine"
  modified_base 1, 2, 3, 4, 5, 6, 7, 8, 9, 10, 11, 12, 13, 14, 16, 17, 18, 19: /mod_base = "2'-hydroxy corresponding base"
uuuggcugcgacgccaugatt

SEQ ID NO: 893 - DNA, 21 bp, artificial sequence
  siRNA reactive to human Eg5
  5'-terminal nucleic acid is a nucleoside, i.e. base + sugar but lacking 5'-phosphate
  modified_base 2, 3, 10, 11, 14, 15, 18: /mod_base = "2'-O-methyl corresponding base"
  modified_base 21: /mod_base = "5'-thio thymidine"
  modified_base 1, 4, 5, 6, 7, 8, 9, 12, 13, 16, 17, 19: /mod_base = "2'-hydroxy corresponding base"
acuggaggauuggcugacatt

SEQ ID NO: 894 - DNA, 21 bp, artificial sequence
  siRNA reactive to human Eg5
  5'-terminal nucleic acid is a nucleoside, i.e. base + sugar but lacking 5'-phosphate
  modified_base 4, 8, 16: /mod_base = "2'-O-methyl corresponding base"
  modified_base 21: /mod_base = "5'-thio thymidine"
  modified_base 1, 2, 3, 5, 6, 7, 9, 10, 11, 12, 13, 14, 15, 17, 18, 19: /mod_base = "2'-hydroxy corresponding base"
ugucagccaauccuccagutt

SEQ ID NO: 895 - DNA, 21 bp, artificial sequence
  siRNA reactive to human Eg5
  5'-terminal nucleic acid is a nucleoside, i.e. base + sugar but lacking 5'-phosphate
  modified_base 1, 2, 4, 7, 8, 10, 12, 13, 15, 16, 17, 18, 19: /mod_base = "2'-O-methyl corresponding base"
  modified_base 21: /mod_base = "5'-thio thymidine"
  modified_base 3, 5, 6, 9, 11, 14: /mod_base = "2'-hydroxy corresponding base"
cuauaauugcacuaucuuutt

SEQ ID NO: 896 - DNA, 21 bp, artificial sequence
  siRNA reactive to human Eg5
  5'-terminal nucleic acid is a nucleoside, i.e. base + sugar but lacking 5'-phosphate
  modified_base 6, 11, 15, 17: /mod_base = "2'-O-methyl corresponding base"
  modified_base 21: /mod_base = "5'-thio thymidine"
  modified_base 1, 2, 3, 4, 5, 7, 8, 9, 10, 12, 13, 14, 16, 18, 19: /mod_base = "2'-hydroxy corresponding base"
aaagauagugcaauuauagtt

SEQ ID NO: 897 - DNA, 21 bp, artificial sequence
  siRNA reactive to human Eg5
  5'-terminal nucleic acid is a nucleoside, i.e. base + sugar but lacking 5'-phosphate
  modified_base 6, 7, 9, 10, 11, 14: /mod_base = "2'-O-methyl corresponding base"
  modified_base 21: /mod_base = "5'-thio thymidine"
  modified_base 1, 2, 3, 4, 5, 8, 12, 13, 15, 16, 17, 18, 19: /mod_base = "2'-hydroxy corresponding base"
aaaggucaccuaaugaagatt

SEQ ID NO: 898 - DNA, 21 bp, artificial sequence
  siRNA reactive to human Eg5
  5'-terminal nucleic acid is a nucleoside, i.e. base + sugar but lacking 5'-phosphate
  modified_base 5, 8: /mod_base = "2'-O-methyl corresponding base"
  modified_base 21: /mod_base = "5'-thio thymidine"
  modified_base 1, 2, 3, 4, 6, 7, 9, 10, 11, 12, 13, 14, 15, 16, 17, 18, 19: /mod_base = "2'-hydroxy corresponding base"
ucuucauuaggugaccuuutt

SEQ ID NO: 899 - DNA, 21 bp, artificial sequence
  siRNA reactive to human Eg5
  5'-terminal nucleic acid is a nucleoside, i.e. base + sugar but lacking 5'-phosphate
  modified_base 2, 6, 8, 10, 12, 13, 14, 15, 18, 19: /mod_base = "2'-O-methyl corresponding base"
  modified_base 21: /mod_base = "5'-thio thymidine"
  modified_base 1, 3, 4, 5, 7, 9, 11, 16, 17: /mod_base = "2'-hydroxy corresponding base"
augaaugcauacucuaguctt

SEQ ID NO: 900 - DNA, 21 bp, artificial sequence
  siRNA reactive to human Eg5
  5'-terminal nucleic acid is a nucleoside, i.e. base + sugar but lacking 5'-phosphate
  modified_base 4, 9, 13, 17: /mod_base = "2'-O-methyl corresponding base"
  modified_base 21: /mod_base = "5'-thio thymidine"
  modified_base 1, 2, 3, 5, 6, 7, 8, 10, 11, 12, 14, 15, 16, 18, 19: /mod_base = "2'-hydroxy corresponding base"
gacuagaguaugcauucautt

SEQ ID NO: 901 - DNA, 21 bp, artificial sequence
  siRNA reactive to human Eg5
  5'-terminal nucleic acid is a nucleoside, i.e. base + sugar but lacking 5'-phosphate
  modified_base 3, 5, 7, 8, 12, 16, 17, 18: /mod_base = "2'-O-methyl corresponding base"
  modified_base 21: /mod_base = "5'-thio thymidine"
  modified_base 1, 2, 4, 6, 9, 10, 11, 13, 14, 15, 19: /mod_base = "2'-hydroxy corresponding base"
aacauauugaauaagccugtt

SEQ ID NO: 902 - DNA, 21 bp, artificial sequence
  siRNA reactive to human Eg5
  5'-terminal nucleic acid is a nucleoside, i.e. base + sugar but lacking 5'-phosphate
  modified_base 1, 7, 11, 14: /mod_base = "2'-O-methyl corresponding base"
  modified_base 21: /mod_base = "5'-thio thymidine"
  modified_base 2, 3, 4, 5, 6, 8, 9, 10, 12, 13, 15, 16, 17, 18, 19: /mod_base = "2'-hydroxy corresponding base"
caggcuuauucaauauguutt

SEQ ID NO: 903 - DNA, 21 bp, artificial sequence
  siRNA reactive to human Eg5
  5'-terminal nucleic acid is a nucleoside, i.e. base + sugar but lacking 5'-phosphate
  modified_base 8, 11, 12, 15, 16, 19: /mod_base = "2'-O-methyl corresponding base"
  modified_base 21: /mod_base = "5'-thio thymidine"
  modified_base 1, 2, 3, 4, 5, 6, 7, 9, 10, 13, 14, 17, 18: /mod_base = "2'-hydroxy corresponding base"
aagaaggcaguugaccaactt

SEQ ID NO: 904 - DNA, 21 bp, artificial sequence
  siRNA reactive to human Eg5
  5'-terminal nucleic acid is a nucleoside, i.e. base + sugar but lacking 5'-phosphate
  modified_base 7: /mod_base = "2'-O-methyl corresponding base"
  modified_base 21: /mod_base = "5'-thio thymidine"
  modified_base 1, 2, 3, 4, 5, 6, 8, 9, 10, 11, 12, 13, 14, 15, 16, 17, 18, 19: /mod_base = "2'-hydroxy corresponding base"
guuggucaacugccuucuutt

SEQ ID NO: 905 - DNA, 21 bp, artificial sequence
  siRNA reactive to human Eg5
  5'-terminal nucleic acid is a nucleoside, i.e. base + sugar but lacking 5'-phosphate
  modified_base 3, 5, 6, 14, 17, 18: /mod_base = "2'-O-methyl corresponding base"
  modified_base 21: /mod_base = "5'-thio thymidine"
  modified_base 1, 2, 4, 7, 8, 9, 10, 11, 12, 13, 15, 16, 19: /mod_base = "2'-hydroxy corresponding base"
gauacuaaaagaacaaucatt

SEQ ID NO: 906 - DNA, 21 bp, artificial sequence
  siRNA reactive to human Eg5
  5'-terminal nucleic acid is a nucleoside, i.e. base + sugar but lacking 5'-phosphate
  modified_base 13, 16: /mod_base = "2'-O-methyl corresponding base"
  modified_base 21: /mod_base = "5'-thio thymidine"
  modified_base 1, 2, 3, 4, 5, 6, 7, 8, 9, 10, 11, 12, 14, 15, 17, 18, 19: /mod_base = "2'-hydroxy corresponding base"
ugauuguucuuuuaguauctt

SEQ ID NO: 907 - DNA, 21 bp, artificial sequence
  siRNA reactive to human Eg5
  5'-terminal nucleic acid is a nucleoside, i.e. base + sugar but lacking 5'-phosphate
  modified_base 2, 4, 5, 11, 12, 15, 18, 19: /mod_base = "2'-O-methyl corresponding base"
  modified_base 21: /mod_base = "5'-thio thymidine"
  modified_base 1, 3, 6, 7, 8, 9, 10, 13, 14, 16, 17: /mod_base = "2'-hydroxy corresponding base"
auacugaaaaucaauaguctt

SEQ ID NO: 908 - DNA, 21 bp, artificial sequence
  siRNA reactive to human Eg5
  5'-terminal nucleic acid is a nucleoside, i.e. base + sugar but lacking 5'-phosphate
  modified_base 4, 14, 17: /mod_base = "2'-O-methyl corresponding base"
  modified_base 21: /mod_base = "5'-thio thymidine"
  modified_base 1, 2, 3, 5, 6, 7, 8, 9, 10, 11, 12, 13, 15, 16, 18, 19: /mod_base = "2'-hydroxy corresponding base"
gacuauugauuuucaguautt

SEQ ID NO: 909 - DNA, 21 bp, artificial sequence
  siRNA reactive to human Eg5
  5'-terminal nucleic acid is a nucleoside, i.e. base + sugar but lacking 5'-phosphate
  modified_base 10, 11, 15, 18, 19: /mod_base = "2'-O-methyl corresponding base"
  modified_base 21: /mod_base = "5'-thio thymidine"
  modified_base 1, 2, 3, 4, 5, 6, 7, 8, 9, 12, 13, 14, 16, 17: /mod_base = "2'-hydroxy corresponding base"
aaaaaggaacuagauggcutt

SEQ ID NO: 910 - DNA, 21 bp, artificial sequence
  siRNA reactive to human Eg5
  5'-terminal nucleic acid is a nucleoside, i.e. base + sugar but lacking 5'-phosphate
  modified_base 4, 8: /mod_base = "2'-O-methyl corresponding base"
  modified_base 21: /mod_base = "5'-thio thymidine"
  modified_base 1, 2, 3, 5, 6, 7, 9, 10, 11, 12, 13, 14, 15, 16, 17, 18, 19: /mod_base = "2'-hydroxy corresponding base"
agccaucuaguuccuuuuutt

SEQ ID NO: 911 - DNA, 21 bp, artificial sequence
  siRNA reactive to human Eg5
  5'-terminal nucleic acid is a nucleoside, i.e. base + sugar but lacking 5'-phosphate
  modified_base 4, 5, 9, 12, 13, 14, 15, 16, 17, 18: /mod_base = "2'-O-methyl corresponding base"
  modified_base 21: /mod_base = "5'-thio thymidine"
  modified_base 1, 2, 3, 6, 7, 8, 10, 11, 19: /mod_base = "2'-hydroxy corresponding base"
gaacuagauggcuuucucatt

SEQ ID NO: 912 - DNA, 21 bp, artificial sequence
  siRNA reactive to human Eg5
  5'-terminal nucleic acid is a nucleoside, i.e. base + sugar but lacking 5'-phosphate
  modified_base 10, 14: /mod_base = "2'-O-methyl corresponding base"
  modified_base 21: /mod_base = "5'-thio thymidine"
  modified_base 1, 2, 3, 4, 5, 6, 7, 8, 9, 11, 12, 13, 15, 16, 17, 18, 19: /mod_base = "2'-hydroxy corresponding base"
ugagaaagccaucuaguuctt

SEQ ID NO: 913 - DNA, 21 bp, artificial sequence
  siRNA reactive to human Eg5
  5'-terminal nucleic acid is a nucleoside, i.e. base + sugar but lacking 5'-phosphate
  modified_base 5, 6, 7, 10, 11, 17, 18, 19: /mod_base = "2'-O-methyl corresponding base"
  modified_base 21: /mod_base = "5'-thio thymidine"
  modified_base 1, 2, 3, 4, 8, 9, 12, 13, 14, 15, 16: /mod_base = "2'-hydroxy corresponding base"
gaaaccuaacugaagaccutt

SEQ ID NO: 914 - DNA, 21 bp, artificial sequence
  siRNA reactive to human Eg5
  5'-terminal nucleic acid is a nucleoside, i.e. base + sugar but lacking 5'-phosphate
  modified_base 8, 12: /mod_base = "2'-O-methyl corresponding base"
  modified_base 21: /mod_base = "5'-thio thymidine"
  modified_base 1, 2, 3, 4, 5, 6, 7, 9, 10, 11, 13, 14, 15, 16, 17, 18, 19: /mod_base = "2'-hydroxy corresponding base"
aggucuucaguuagguuuctt

SEQ ID NO: 915 - DNA, 21 bp, artificial sequence
  siRNA reactive to human Eg5
  5'-terminal nucleic acid is a nucleoside, i.e. base + sugar but lacking 5'-phosphate
  modified_base 1, 3, 4, 5, 7, 8, 11, 13, 14, 17: /mod_base = "2'-O-methyl corresponding base"
  modified_base 21: /mod_base = "5'-thio thymidine"
  modified_base 2, 6, 9, 10, 12, 15, 16, 18, 19: /mod_base = "2'-hydroxy corresponding base"
uacccaucaacacugguaatt

SEQ ID NO: 916 - DNA, 21 bp, artificial sequence
  siRNA reactive to human Eg5
  5'-terminal nucleic acid is a nucleoside, i.e. base + sugar but lacking 5'-phosphate
  modified_base 2, 5, 18: /mod_base = "2'-O-methyl corresponding base"
  modified_base 21: /mod_base = "5'-thio thymidine"
  modified_base 1, 3, 4, 6, 7, 8, 9, 10, 11, 12, 13, 14, 15, 16, 17, 19: /mod_base = "2'-hydroxy corresponding base"
uuaccaguguugauggguatt

SEQ ID NO: 917 - DNA, 21 bp, artificial sequence
  siRNA reactive to human Eg5
  5'-terminal nucleic acid is a nucleoside, i.e. base + sugar but lacking 5'-phosphate
  modified_base 2, 3, 4, 5, 8, 10, 11, 12, 14, 15, 16, 18, 19: /mod_base = "2'-O-methyl corresponding base"
  modified_base 21: /mod_base = "5'-thio thymidine"
  modified_base 1, 6, 7, 9, 13, 17: /mod_base = "2'-hydroxy corresponding base"
auuuugauaucuacccauutt

SEQ ID NO: 918 - DNA, 21 bp, artificial sequence
  siRNA reactive to human Eg5
  5'-terminal nucleic acid is a nucleoside, i.e. base + sugar but lacking 5'-phosphate
  modified_base 7, 11, 14: /mod_base = "2'-O-methyl corresponding base"
  modified_base 21: /mod_base = "5'-thio thymidine"
  modified_base 1, 2, 3, 4, 5, 6, 8, 9, 10, 12, 13, 15, 16, 17, 18, 19: /mod_base = "2'-hydroxy corresponding base"
aauggguagauaucaaaautt

SEQ ID NO: 919 - DNA, 21 bp, artificial sequence
  siRNA reactive to human Eg5
  5'-terminal nucleic acid is a nucleoside, i.e. base + sugar but lacking 5'-phosphate
  modified_base 2, 3, 4, 5, 6, 8, 11, 12, 13, 15, 16, 17, 18: /mod_base = "2'-O-methyl corresponding base"
  modified_base 21: /mod_base = "5'-thio thymidine"
  modified_base 1, 7, 9, 10, 14, 19: /mod_base = "2'-hydroxy corresponding base"
aucccuauaguucacuuugtt

SEQ ID NO: 920 - DNA, 21 bp, artificial sequence
  siRNA reactive to human Eg5
  5'-terminal nucleic acid is a nucleoside, i.e. base + sugar but lacking 5'-phosphate
  modified_base 1, 11, 13: /mod_base = "2'-O-methyl corresponding base"
  modified_base 21: /mod_base = "5'-thio thymidine"
  modified_base 2, 3, 4, 5, 6, 7, 8, 9, 10, 12, 14, 15, 16, 17, 18, 19: /mod_base = "2'-hydroxy corresponding base"
caaagugaacuauagggautt

SEQ ID NO: 921 - DNA, 21 bp, artificial sequence
  siRNA reactive to human Eg5
  5'-terminal nucleic acid is a nucleoside, i.e. base + sugar but lacking 5'-phosphate
  modified_base 2, 6, 7, 9, 12, 13, 15, 17, 18: /mod_base = "2'-O-methyl corresponding base"
  modified_base 21: /mod_base = "5'-thio thymidine"
  modified_base 1, 3, 4, 5, 8, 10, 11, 14, 16, 19: /mod_base = "2'-hydroxy corresponding base"
augggcuauaauugcacuatt

SEQ ID NO: 922 - DNA, 21 bp, artificial sequence
  siRNA reactive to human Eg5
  5'-terminal nucleic acid is a nucleoside, i.e. base + sugar but lacking 5'-phosphate
  modified_base 1, 6, 10, 12, 17: /mod_base = "2'-O-methyl corresponding base"
  modified_base 21: /mod_base = "5'-thio thymidine"
  modified_base 2, 3, 4, 5, 7, 8, 9, 11, 13, 14, 15, 16, 18, 19: /mod_base = "2'-hydroxy corresponding base"
uagugcaauuauagcccautt

SEQ ID NO: 923 - DNA, 21 bp, artificial sequence
  siRNA reactive to human Eg5
  5'-terminal nucleic acid is a nucleoside, i.e. base + sugar but lacking 5'-phosphate
  modified_base 4, 5, 7, 8, 9, 10, 11, 13, 17, 18, 19: /mod_base = "2'-O-methyl corresponding base"
  modified_base 21: /mod_base = "5'-thio thymidine"
  modified_base 1, 2, 3, 6, 12, 14, 15, 16: /mod_base = "2'-hydroxy corresponding base"
agauuaccucugcgagccctt

SEQ ID NO: 924 - DNA, 21 bp, artificial sequence
  siRNA reactive to human Eg5
  5'-terminal nucleic acid is a nucleoside, i.e. base + sugar but lacking 5'-phosphate
  modified_base 8, 14: /mod_base = "2'-O-methyl corresponding base"
  modified_base 21: /mod_base = "5'-thio thymidine"
  modified_base 1, 2, 3, 4, 5, 6, 7, 9, 10, 11, 12, 13, 15, 16, 17, 18, 19: /mod_base = "2'-hydroxy corresponding base"
gggcucgcagagguaaucutt

SEQ ID NO: 925 - DNA, 21 bp, artificial sequence
  siRNA reactive to human Eg5
  5'-terminal nucleic acid is a nucleoside, i.e. base + sugar but lacking 5'-phosphate
  modified_base 1, 4, 5, 6, 7, 9, 11, 13, 14, 15, 16, 17, 18: /mod_base = "2'-O-methyl corresponding base"
  modified_base 21: /mod_base = "5'-thio thymidine"
  modified_base 2, 3, 8, 10, 12, 19: /mod_base = "2'-hydroxy corresponding base"
uaauuccacguacccuucatt

SEQ ID NO: 926 - DNA, 21 bp, artificial sequence
  siRNA reactive to human Eg5
  5'-terminal nucleic acid is a nucleoside, i.e. base + sugar but lacking 5'-phosphate
  modified_base 8, 18: /mod_base = "2'-O-methyl corresponding base"
  modified_base 21: /mod_base = "5'-thio thymidine"
  modified_base 1, 2, 3, 4, 5, 6, 7, 9, 10, 11, 12, 13, 14, 15, 16, 17, 19: /mod_base = "2'-hydroxy corresponding base"
ugaaggguacguggaauuatt

SEQ ID NO: 927 - DNA, 21 bp, artificial sequence
  siRNA reactive to human Eg5
  5'-terminal nucleic acid is a nucleoside, i.e. base + sugar but lacking 5'-phosphate
  modified_base 2, 3, 5, 6, 7, 8, 9, 11, 12, 13, 16, 17, 18, 19: /mod_base = "2'-O-methyl corresponding base"
  modified_base 21: /mod_base = "5'-thio thymidine"
  modified_base 1, 4, 10, 14, 15: /mod_base = "2'-hydroxy corresponding base"
gucguucccacucaguuuutt

SEQ ID NO: 928 - DNA, 21 bp, artificial sequence
  siRNA reactive to human Eg5
  5'-terminal nucleic acid is a nucleoside, i.e. base + sugar but lacking 5'-phosphate
  modified_base 6, 10: /mod_base = "2'-O-methyl corresponding base"
  modified_base 21: /mod_base = "5'-thio thymidine"
  modified_base 1, 2, 3, 4, 5, 7, 8, 9, 11, 12, 13, 14, 15, 16, 17, 18, 19: /mod_base = "2'-hydroxy corresponding base"
aaaacugagugggaacgactt

SEQ ID NO: 929 - DNA, 21 bp, artificial sequence
  siRNA reactive to human Eg5
  5'-terminal nucleic acid is a nucleoside, i.e. base + sugar but lacking 5'-phosphate
  modified_base 4, 5, 8, 9, 10, 11, 12, 14, 15, 18, 19: /mod_base = "2'-O-methyl corresponding base"
  modified_base 21: /mod_base = "5'-thio thymidine"
  modified_base 1, 2, 3, 6, 7, 13, 16, 17: /mod_base = "2'-hydroxy corresponding base"
aaaucaaucccuguugacutt

SEQ ID NO: 930 - DNA, 21 bp, artificial sequence
  siRNA reactive to human Eg5
  5'-terminal nucleic acid is a nucleoside, i.e. base + sugar but lacking 5'-phosphate
  modified_base 4, 7: /mod_base = "2'-O-methyl corresponding base"
  modified_base 21: /mod_base = "5'-thio thymidine"
  modified_base 1, 2, 3, 5, 6, 8, 9, 10, 11, 12, 13, 14, 15, 16, 17, 18, 19: /mod_base = "2'-hydroxy corresponding base"
agucaacagggauugauuutt

SEQ ID NO: 931 - DNA, 21 bp, artificial sequence
  siRNA reactive to human Eg5
  5'-terminal nucleic acid is a nucleoside, i.e. base + sugar but lacking 5'-phosphate
  modified_base 1, 2, 4, 9, 16, 18: /mod_base = "2'-O-methyl corresponding base"
  modified_base 21: /mod_base = "5'-thio thymidine"
  modified_base 3, 5, 6, 7, 8, 10, 11, 12, 13, 14, 15, 17, 19: /mod_base = "2'-hydroxy corresponding base"
ucauagagcaaagaacauatt

SEQ ID NO: 932 - DNA, 21 bp, artificial sequence
  siRNA reactive to human Eg5
  5'-terminal nucleic acid is a nucleoside, i.e. base + sugar but lacking 5'-phosphate
  modified_base 1, 15: /mod_base = "2'-O-methyl corresponding base"
  modified_base 21: /mod_base = "5'-thio thymidine"
  modified_base 2, 3, 4, 5, 6, 7, 8, 9, 10, 11, 12, 13, 14, 16, 17, 18, 19: /mod_base = "2'-hydroxy corresponding base"
uauguucuuugcucuaugatt

SEQ ID NO: 933 - DNA, 21 bp, artificial sequence
  siRNA reactive to human Eg5
  5'-terminal nucleic acid is a nucleoside, i.e. base + sugar but lacking 5'-phosphate
  modified_base 1, 2, 4, 5, 7, 10, 13, 15, 16, 17: /mod_base = "2'-O-methyl corresponding base"
  modified_base 21: /mod_base = "5'-thio thymidine"
  modified_base 3, 6, 8, 9, 11, 12, 14, 18, 19: /mod_base = "2'-hydroxy corresponding base"
uuacuacaguagcacuuggtt

SEQ ID NO: 934 - DNA, 21 bp, artificial sequence
  siRNA reactive to human Eg5
  5'-terminal nucleic acid is a nucleoside, i.e. base + sugar but lacking 5'-phosphate
  modified_base 2, 9, 14, 17: /mod_base = "2'-O-methyl corresponding base"
  modified_base 21: /mod_base = "5'-thio thymidine"
  modified_base 1, 3, 4, 5, 6, 7, 8, 10, 11, 12, 13, 15, 16, 18, 19: /mod_base = "2'-hydroxy corresponding base"
ccaagugcuacuguaguaatt

SEQ ID NO: 935 - DNA, 21 bp, artificial sequence
  siRNA reactive to human Eg5
  5'-terminal nucleic acid is a nucleoside, i.e. base + sugar but lacking 5'-phosphate
  modified_base 2, 4, 10, 11, 12, 15, 16: /mod_base = "2'-O-methyl corresponding base"
  modified_base 21: /mod_base = "5'-thio thymidine"
  modified_base 1, 3, 5, 6, 7, 8, 9, 13, 14, 17, 18, 19: /mod_base = "2'-hydroxy corresponding base"
auguggaaaccuaacugaatt

SEQ ID NO: 936 - DNA, 21 bp, artificial sequence
  siRNA reactive to human Eg5
  5'-terminal nucleic acid is a nucleoside, i.e. base + sugar but lacking 5'-phosphate
  modified_base 3, 7, 15, 17: /mod_base = "2'-O-methyl corresponding base"
  modified_base 21: /mod_base = "5'-thio thymidine"
  modified_base 1, 2, 4, 5, 6, 8, 9, 10, 11, 12, 13, 14, 16, 18, 19: /mod_base = "2'-hydroxy corresponding base"
uucaguuagguuuccacautt

SEQ ID NO: 937 - DNA, 21 bp, artificial sequence
  siRNA reactive to human Eg5
  5'-terminal nucleic acid is a nucleoside, i.e. base + sugar but lacking 5'-phosphate
  modified_base 1, 3, 9, 10, 11, 14, 15: /mod_base = "2'-O-methyl corresponding base"
  modified_base 21: /mod_base = "5'-thio thymidine"
  modified_base 2, 4, 5, 6, 7, 8, 12, 13, 16, 17, 18, 19: /mod_base = "2'-hydroxy corresponding base"
uguggaaaccuaacugaagtt

SEQ ID NO: 938 - DNA, 21 bp, artificial sequence
  siRNA reactive to human Eg5
  5'-terminal nucleic acid is a nucleoside, i.e. base + sugar but lacking 5'-phosphate
  modified_base 4, 8, 16, 18: /mod_base = "2'-O-methyl corresponding base"
  modified_base 21: /mod_base = "5'-thio thymidine"
  modified_base 1, 2, 3, 5, 6, 7, 9, 10, 11, 12, 13, 14, 15, 17, 19: /mod_base = "2'-hydroxy corresponding base"
cuucaguuagguuuccacatt

SEQ ID NO: 939 - DNA, 21 bp, artificial sequence
  siRNA reactive to human Eg5
  5'-terminal nucleic acid is a nucleoside, i.e. base + sugar but lacking 5'-phosphate
  modified_base 1, 2, 3, 4, 5, 6, 7, 8, 12: /mod_base = "2'-O-methyl corresponding base"
  modified_base 21: /mod_base = "5'-thio thymidine"
  modified_base 9, 10, 11, 13, 14, 15, 16, 17, 18, 19: /mod_base = "2'-hydroxy corresponding base"
ucuuccuuaaaugaaagggtt

SEQ ID NO: 940 - DNA, 21 bp, artificial sequence
  siRNA reactive to human Eg5
  5'-terminal nucleic acid is a nucleoside, i.e. base + sugar but lacking 5'-phosphate
  modified_base 7, 11: /mod_base = "2'-O-methyl corresponding base"
  modified_base 21: /mod_base = "5'-thio thymidine"
  modified_base 1, 2, 3, 4, 5, 6, 8, 9, 10, 12, 13, 14, 15, 16, 17, 18, 19: /mod_base = "2'-hydroxy corresponding base"
cccuuucauuuaaggaagatt

SEQ ID NO: 941 - DNA, 21 bp, artificial sequence
  siRNA reactive to human Eg5
  5'-terminal nucleic acid is a nucleoside, i.e. base + sugar but lacking 5'-phosphate
  modified_base 1, 8, 9, 10, 11, 12, 16, 17: /mod_base = "2'-O-methyl corresponding base"
  modified_base 21: /mod_base = "5'-thio thymidine"
  modified_base 2, 3, 4, 5, 6, 7, 13, 14, 15, 18, 19: /mod_base = "2'-hydroxy corresponding base"
ugaagaaccucuaagucaatt

SEQ ID NO: 942 - DNA, 21 bp, artificial sequence
  siRNA reactive to human Eg5
  5'-terminal nucleic acid is a nucleoside, i.e. base + sugar but lacking 5'-phosphate
  modified_base 7, 18: /mod_base = "2'-O-methyl corresponding base"
  modified_base 21: /mod_base = "5'-thio thymidine"
  modified_base 1, 2, 3, 4, 5, 6, 8, 9, 10, 11, 12, 13, 14, 15, 16, 17, 19: /mod_base = "2'-hydroxy corresponding base"
uugacuuagagguucuucatt

SEQ ID NO: 943 - DNA, 21 bp, artificial sequence
  siRNA reactive to human Eg5
  5'-terminal nucleic acid is a nucleoside, i.e. base + sugar but lacking 5'-phosphate
  modified_base 6, 7, 8, 13: /mod_base = "2'-O-methyl corresponding base"
  modified_base 21: /mod_base = "5'-thio thymidine"
  modified_base 1, 2, 3, 4, 5, 9, 10, 11, 12, 14, 15, 16, 17, 18, 19: /mod_base = "2'-hydroxy corresponding base"
agaggucuaaaguggaagatt

SEQ ID NO: 944 - DNA, 21 bp, artificial sequence
  siRNA reactive to human Eg5
  5'-terminal nucleic acid is a nucleoside, i.e. base + sugar but lacking 5'-phosphate
  modified_base 6, 11: /mod_base = "2'-O-methyl corresponding base"
  modified_base 21: /mod_base = "5'-thio thymidine"
  modified_base 1, 2, 3, 4, 5, 7, 8, 9, 10, 12, 13, 14, 15, 16, 17, 18, 19: /mod_base = "2'-hydroxy corresponding base"
ucuuccacuuuagaccucutt

SEQ ID NO: 945 - DNA, 21 bp, artificial sequence
  siRNA reactive to human Eg5
  5'-terminal nucleic acid is a nucleoside, i.e. base + sugar but lacking 5'-phosphate
  modified_base 2, 4, 5, 6, 8, 9, 10, 12, 13, 14, 15, 16, 17, 18: /mod_base = "2'-O-methyl corresponding base"
  modified_base 21: /mod_base = "5'-thio thymidine"
  modified_base 1, 3, 7, 11, 19: /mod_base = "2'-hydroxy corresponding base"
auaucuacccauuuuucugtt

SEQ ID NO: 946 - DNA, 21 bp, artificial sequence
  siRNA reactive to human Eg5
  5'-terminal nucleic acid is a nucleoside, i.e. base + sugar but lacking 5'-phosphate
  modified_base 1, 13, 17: /mod_base = "2'-O-methyl corresponding base"
  modified_base 21: /mod_base = "5'-thio thymidine"
  modified_base 2, 3, 4, 5, 6, 7, 8, 9, 10, 11, 12, 14, 15, 16, 18, 19: /mod_base = "2'-hydroxy corresponding base"
cagaaaaauggguagauautt

SEQ ID NO: 947 - DNA, 21 bp, artificial sequence
  siRNA reactive to human Eg5
  5'-terminal nucleic acid is a nucleoside, i.e. base + sugar but lacking 5'-phosphate
  modified_base 1, 5, 6, 7, 12, 16, 17: /mod_base = "2'-O-methyl corresponding base"
  modified_base 21: /mod_base = "5'-thio thymidine"
  modified_base 2, 3, 4, 8, 9, 10, 11, 13, 14, 15, 18, 19: /mod_base = "2'-hydroxy corresponding base"
uaagccugaagugaaucagtt

SEQ ID NO: 948 - DNA, 21 bp, artificial sequence
  siRNA reactive to human Eg5
  5'-terminal nucleic acid is a nucleoside, i.e. base + sugar but lacking 5'-phosphate
  modified_base 7, 12, 18: /mod_base = "2'-O-methyl corresponding base"
  modified_base 21: /mod_base = "5'-thio thymidine"
  modified_base 1, 2, 3, 4, 5, 6, 8, 9, 10, 11, 13, 14, 15, 16, 17, 19: /mod_base = "2'-hydroxy corresponding base"
cugauucacuucaggcuuatt

SEQ ID NO: 949 - DNA, 21 bp, artificial sequence
  siRNA reactive to human Eg5
  5'-terminal nucleic acid is a nucleoside, i.e. base + sugar but lacking 5'-phosphate
  modified_base 4, 6, 10, 11, 13, 14, 15, 18, 19: /mod_base = "2'-O-methyl corresponding base"
  modified_base 21: /mod_base = "5'-thio thymidine"
  modified_base 1, 2, 3, 5, 7, 8, 9, 12, 16, 17: /mod_base = "2'-hydroxy corresponding base"
agaugcagaccauuuaauutt

SEQ ID NO: 950 - DNA, 21 bp, artificial sequence
  siRNA reactive to human Eg5
  5'-terminal nucleic acid is a nucleoside, i.e. base + sugar but lacking 5'-phosphate
  modified_base 4, 15: /mod_base = "2'-O-methyl corresponding base"
  modified_base 21: /mod_base = "5'-thio thymidine"
  modified_base 1, 2, 3, 5, 6, 7, 8, 9, 10, 11, 12, 13, 14, 16, 17, 18, 19: /mod_base = "2'-hydroxy corresponding base"
aauuaaauggucugcaucutt

SEQ ID NO: 951 - DNA, 21 bp, artificial sequence
  siRNA reactive to human Eg5
  5'-terminal nucleic acid is a nucleoside, i.e. base + sugar but lacking 5'-phosphate
  modified_base 3, 5, 6, 8, 9, 10, 12, 13, 14, 17, 18, 19: /mod_base = "2'-O-methyl corresponding base"
  modified_base 21: /mod_base = "5'-thio thymidine"
  modified_base 1, 2, 4, 7, 11, 15, 16: /mod_base = "2'-hydroxy corresponding base"
aguguuguuuguccaauuctt

SEQ ID NO: 952 - DNA, 21 bp, artificial sequence
  siRNA reactive to human Eg5
  5'-terminal nucleic acid is a nucleoside, i.e. base + sugar but lacking 5'-phosphate
  modified_base 9, 13, 16: /mod_base = "2'-O-methyl corresponding base"
  modified_base 21: /mod_base = "5'-thio thymidine"
  modified_base 1, 2, 3, 4, 5, 6, 7, 8, 10, 11, 12, 14, 15, 17, 18, 19: /mod_base = "2'-hydroxy corresponding base"
gaauuggacaaacaacacutt

SEQ ID NO: 953 - DNA, 21 bp, artificial sequence
  siRNA reactive to human Eg5
  5'-terminal nucleic acid is a nucleoside, i.e. base + sugar but lacking 5'-phosphate
  modified_base 1, 2, 4, 7, 14, 15, 16, 17, 18, 19: /mod_base = "2'-O-methyl corresponding base"
  modified_base 21: /mod_base = "5'-thio thymidine"
  modified_base 3, 5, 6, 8, 9, 10, 11, 12, 13: /mod_base = "2'-hydroxy corresponding base"
cuauaaugaagagcuuuuutt

SEQ ID NO: 954 - DNA, 21 bp, artificial sequence
  siRNA reactive to human Eg5
  5'-terminal nucleic acid is a nucleoside, i.e. base + sugar but lacking 5'-phosphate
  modified_base 12, 15, 17: /mod_base = "2'-O-methyl corresponding base"
  modified_base 21: /mod_base = "5'-thio thymidine"
  modified_base 1, 2, 3, 4, 5, 6, 7, 8, 9, 10, 11, 13, 14, 16, 18, 19: /mod_base = "2'-hydroxy corresponding base"
aaaaagcucuucauuauagtt

SEQ ID NO: 955 - DNA, 21 bp, artificial sequence
  siRNA reactive to human Eg5
  5'-terminal nucleic acid is a nucleoside, i.e. base + sugar but lacking 5'-phosphate
  modified_base 8, 11, 14, 15: /mod_base = "2'-O-methyl corresponding base"
  modified_base 21: /mod_base = "5'-thio thymidine"
  modified_base 1, 2, 3, 4, 5, 6, 7, 9, 10, 12, 13, 16, 17, 18, 19: /mod_base = "2'-hydroxy corresponding base"
agaggagugauaauuaaagtt

SEQ ID NO: 956 - DNA, 21 bp, artificial sequence
  siRNA reactive to human Eg5
  5'-terminal nucleic acid is a nucleoside, i.e. base + sugar but lacking 5'-phosphate
  modified_base 4, 8, 11: /mod_base = "2'-O-methyl corresponding base"
  modified_base 21: /mod_base = "5'-thio thymidine"
  modified_base 1, 2, 3, 5, 6, 7, 9, 10, 12, 13, 14, 15, 16, 17, 18, 19: /mod_base = "2'-hydroxy corresponding base"
cuuuaauuaucacuccucutt

SEQ ID NO: 957 - DNA, 21 bp, artificial sequence
  siRNA reactive to human Eg5
  5'-terminal nucleic acid is a nucleoside, i.e. base + sugar but lacking 5'-phosphate
  modified_base 1, 2, 3, 4, 5, 6, 7, 9, 10, 12, 15, 17, 19: /mod_base = "2'-O-methyl corresponding base"
  modified_base 21: /mod_base = "5'-thio thymidine"
  modified_base 8, 11, 13, 14, 16, 18: /mod_base = "2'-hydroxy corresponding base"
uuucucuguuacaauacautt

SEQ ID NO: 958 - DNA, 21 bp, artificial sequence
  siRNA reactive to human Eg5
  5'-terminal nucleic acid is a nucleoside, i.e. base + sugar but lacking 5'-phosphate
  modified_base 4, 9, 12: /mod_base = "2'-O-methyl corresponding base"
  modified_base 21: /mod_base = "5'-thio thymidine"
  modified_base 1, 2, 3, 5, 6, 7, 8, 10, 11, 13, 14, 15, 16, 17, 18, 19: /mod_base = "2'-hydroxy corresponding base"
auguauuguaacagagaaatt

SEQ ID NO: 959 - DNA, 21 bp, artificial sequence
  siRNA reactive to human Eg5
  5'-terminal nucleic acid is a nucleoside, i.e. base + sugar but lacking 5'-phosphate
  modified_base 3, 5, 6, 7, 9, 12, 13, 15, 18: /mod_base = "2'-O-methyl corresponding base"
  modified_base 21: /mod_base = "5'-thio thymidine"
  modified_base 1, 2, 4, 8, 10, 11, 14, 16, 17, 19: /mod_base = "2'-hydroxy corresponding base"
aacaucuauaauugcaacatt

SEQ ID NO: 960 - DNA, 21 bp, artificial sequence
  siRNA reactive to human Eg5
  5'-terminal nucleic acid is a nucleoside, i.e. base + sugar but lacking 5'-phosphate
  modified_base 6, 10, 12: /mod_base = "2'-O-methyl corresponding base"
  modified_base 21: /mod_base = "5'-thio thymidine"
  modified_base 1, 2, 3, 4, 5, 7, 8, 9, 11, 13, 14, 15, 16, 17, 18, 19: /mod_base = "2'-hydroxy corresponding base"
uguugcaauuauagauguutt

SEQ ID NO: 961 - DNA, 21 bp, artificial sequence
  siRNA reactive to human Eg5
  5'-terminal nucleic acid is a nucleoside, i.e. base + sugar but lacking 5'-phosphate
  modified_base 1, 3, 4, 10, 12, 14, 19: /mod_base = "2'-O-methyl corresponding base"
  modified_base 21: /mod_base = "5'-thio thymidine"
  modified_base 2, 5, 6, 7, 8, 9, 11, 13, 15, 16, 17, 18: /mod_base = "2'-hydroxy corresponding base"
ugcuagaaguacauaagactt

SEQ ID NO: 962 - DNA, 21 bp, artificial sequence
  siRNA reactive to human Eg5
  5'-terminal nucleic acid is a nucleoside, i.e. base + sugar but lacking 5'-phosphate
  modified_base 5, 9, 15, 18: /mod_base = "2'-O-methyl corresponding base"
  modified_base 21: /mod_base = "5'-thio thymidine"
  modified_base 1, 2, 3, 4, 6, 7, 8, 10, 11, 12, 13, 14, 16, 17, 19: /mod_base = "2'-hydroxy corresponding base"
gucuuauguacuucuagcatt

SEQ ID NO: 963 - DNA, 21 bp, artificial sequence
  siRNA reactive to human Eg5
  5'-terminal nucleic acid is a nucleoside, i.e. base + sugar but lacking 5'-phosphate
  modified_base 3, 5, 7, 8, 9, 14, 15, 18, 19: /mod_base = "2'-O-methyl corresponding base"
  modified_base 21: /mod_base = "5'-thio thymidine"
  modified_base 1, 2, 4, 6, 10, 11, 12, 13, 16, 17: /mod_base = "2'-hydroxy corresponding base"
aauguacucaagacugauctt

SEQ ID NO: 964 - DNA, 21 bp, artificial sequence
  siRNA reactive to human Eg5
  5'-terminal nucleic acid is a nucleoside, i.e. base + sugar but lacking 5'-phosphate
  modified_base 4, 14, 16: /mod_base = "2'-O-methyl corresponding base"
  modified_base 21: /mod_base = "5'-thio thymidine"
  modified_base 1, 2, 3, 5, 6, 7, 8, 9, 10, 11, 12, 13, 15, 17, 18, 19: /mod_base = "2'-hydroxy corresponding base"
gaucagucuugaguacauutt

SEQ ID NO: 965 - DNA, 21 bp, artificial sequence
  siRNA reactive to human Eg5
  5'-terminal nucleic acid is a nucleoside, i.e. base + sugar but lacking 5'-phosphate
  modified_base 2, 4, 5, 6, 11, 12, 15, 16, 17, 18, 19: /mod_base = "2'-O-methyl corresponding base"
  modified_base 21: /mod_base = "5'-thio thymidine"
  modified_base 1, 3, 7, 8, 9, 10, 13, 14: /mod_base = "2'-hydroxy corresponding base"
guacucaagacugaucuuctt

SEQ ID NO: 966 - DNA, 21 bp, artificial sequence
  siRNA reactive to human Eg5
  5'-terminal nucleic acid is a nucleoside, i.e. base + sugar but lacking 5'-phosphate
  modified_base 7, 17: /mod_base = "2'-O-methyl corresponding base"
  modified_base 21: /mod_base = "5'-thio thymidine"
  modified_base 1, 2, 3, 4, 5, 6, 8, 9, 10, 11, 12, 13, 14, 15, 16, 18, 19: /mod_base = "2'-hydroxy corresponding base"
gaagaucagucuugaguactt

SEQ ID NO: 967 - DNA, 21 bp, artificial sequence
  siRNA reactive to human Eg5
  5'-terminal nucleic acid is a nucleoside, i.e. base + sugar but lacking 5'-phosphate
  modified_base 1, 3, 4, 5, 6, 9, 13, 14, 15, 18: /mod_base = "2'-O-methyl corresponding base"
  modified_base 21: /mod_base = "5'-thio thymidine"
  modified_base 2, 7, 8, 10, 11, 12, 16, 17, 19: /mod_base = "2'-hydroxy corresponding base"
cacucugauaaacucaaugtt

SEQ ID NO: 968 - DNA, 21 bp, artificial sequence
  siRNA reactive to human Eg5
  5'-terminal nucleic acid is a nucleoside, i.e. base + sugar but lacking 5'-phosphate
  modified_base 1, 10, 13: /mod_base = "2'-O-methyl corresponding base"
  modified_base 21: /mod_base = "5'-thio thymidine"
  modified_base 2, 3, 4, 5, 6, 7, 8, 9, 11, 12, 14, 15, 16, 17, 18, 19: /mod_base = "2'-hydroxy corresponding base"
cauugaguuuaucagagugtt

SEQ ID NO: 969 - DNA, 21 bp, artificial sequence
  siRNA reactive to human Eg5
  5'-terminal nucleic acid is a nucleoside, i.e. base + sugar but lacking 5'-phosphate
  modified_base 6, 10, 11, 13, 14, 15, 16, 17, 19: /mod_base = "2'-O-methyl corresponding base"
  modified_base 21: /mod_base = "5'-thio thymidine"
  modified_base 1, 2, 3, 4, 5, 7, 8, 9, 12, 18: /mod_base = "2'-hydroxy corresponding base"
aagagcagauuaccucugctt

SEQ ID NO: 970 - DNA, 21 bp, artificial sequence
  siRNA reactive to human Eg5
  5'-terminal nucleic acid is a nucleoside, i.e. base + sugar but lacking 5'-phosphate
  modified_base 2, 8: /mod_base = "2'-O-methyl corresponding base"
  modified_base 21: /mod_base = "5'-thio thymidine"
  modified_base 1, 3, 4, 5, 6, 7, 9, 10, 11, 12, 13, 14, 15, 16, 17, 18, 19: /mod_base = "2'-hydroxy corresponding base"
gcagagguaaucugcucuutt

SEQ ID NO: 971 - DNA, 21 bp, artificial sequence
  siRNA reactive to human Eg5
  5'-terminal nucleic acid is a nucleoside, i.e. base + sugar but lacking 5'-phosphate
  modified_base 1, 2, 3, 5, 9, 10, 11, 15, 16, 19: /mod_base = "2'-O-methyl corresponding base"
  modified_base 21: /mod_base = "5'-thio thymidine"
  modified_base 4, 6, 7, 8, 12, 13, 14, 17, 18: /mod_base = "2'-hydroxy corresponding base"
ucugcgagcccagaucaactt

SEQ ID NO: 972 - DNA, 21 bp, artificial sequence
  siRNA reactive to human Eg5
  5'-terminal nucleic acid is a nucleoside, i.e. base + sugar but lacking 5'-phosphate
  modified_base 16: /mod_base = "2'-O-methyl corresponding base"
  modified_base 21: /mod_base = "5'-thio thymidine"
  modified_base 1, 2, 3, 4, 5, 6, 7, 8, 9, 10, 11, 12, 13, 14, 15, 17, 18, 19: /mod_base = "2'-hydroxy corresponding base"
guugaucugggcucgcagatt

SEQ ID NO: 973 - DNA, 21 bp, artificial sequence
  siRNA reactive to human Eg5
  5'-terminal nucleic acid is a nucleoside, i.e. base + sugar but lacking 5'-phosphate
  modified_base 3, 4, 5, 9, 10, 11, 12, 14, 16, 18: /mod_base = "2'-O-methyl corresponding base"
  modified_base 21: /mod_base = "5'-thio thymidine"
  modified_base 1, 2, 6, 7, 8, 13, 15, 17, 19: /mod_base = "2'-hydroxy corresponding base"
aacuugagccuuguguauatt

SEQ ID NO: 974 - DNA, 21 bp, artificial sequence
  siRNA reactive to human Eg5
  5'-terminal nucleic acid is a nucleoside, i.e. base + sugar but lacking 5'-phosphate
  modified_base 1, 3, 5, 7, 14: /mod_base = "2'-O-methyl corresponding base"
  modified_base 21: /mod_base = "5'-thio thymidine"
  modified_base 2, 4, 6, 8, 9, 10, 11, 12, 13, 15, 16, 17, 18, 19: /mod_base = "2'-hydroxy corresponding base"
uauacacaaggcucaaguutt

SEQ ID NO: 975 - DNA, 21 bp, artificial sequence
  siRNA reactive to human Eg5
  5'-terminal nucleic acid is a nucleoside, i.e. base + sugar but lacking 5'-phosphate
  modified_base 4, 6, 8, 10, 12, 13, 16, 17: /mod_base = "2'-O-methyl corresponding base"
  modified_base 21: /mod_base = "5'-thio thymidine"
  modified_base 1, 2, 3, 5, 7, 9, 11, 14, 15, 18, 19: /mod_base = "2'-hydroxy corresponding base"
gaauauauauaucagccggtt

SEQ ID NO: 976 - DNA, 21 bp, artificial sequence
  siRNA reactive to human Eg5
  5'-terminal nucleic acid is a nucleoside, i.e. base + sugar but lacking 5'-phosphate
  modified_base 9, 11, 13, 15: /mod_base = "2'-O-methyl corresponding base"
  modified_base 21: /mod_base = "5'-thio thymidine"
  modified_base 1, 2, 3, 4, 5, 6, 7, 8, 10, 12, 14, 16, 17, 18, 19: /mod_base = "2'-hydroxy corresponding base"
ccggcugauauauauauuctt

SEQ ID NO: 977 - DNA, 21 bp, artificial sequence
  siRNA reactive to human Eg5
  5'-terminal nucleic acid is a nucleoside, i.e. base + sugar but lacking 5'-phosphate
  modified_base 1, 3, 4, 6, 7, 8, 9, 10, 12, 15, 16, 17, 19: /mod_base = "2'-O-methyl corresponding base"
  modified_base 21: /mod_base = "5'-thio thymidine"
  modified_base 2, 5, 11, 13, 14, 18: /mod_base = "2'-hydroxy corresponding base"
ugucaucccuauaguucactt

SEQ ID NO: 978 - DNA, 21 bp, artificial sequence
  siRNA reactive to human Eg5
  5'-terminal nucleic acid is a nucleoside, i.e. base + sugar but lacking 5'-phosphate
  modified_base 7, 9, 18: /mod_base = "2'-O-methyl corresponding base"
  modified_base 21: /mod_base = "5'-thio thymidine"
  modified_base 1, 2, 3, 4, 5, 6, 8, 10, 11, 12, 13, 14, 15, 16, 17, 19: /mod_base = "2'-hydroxy corresponding base"
gugaacuauagggaugacatt

SEQ ID NO: 979 - DNA, 21 bp, artificial sequence
  siRNA reactive to human Eg5
  5'-terminal nucleic acid is a nucleoside, i.e. base + sugar but lacking 5'-phosphate
  modified_base 3, 4, 5, 8, 11, 12, 14, 16, 17, 18, 19: /mod_base = "2'-O-methyl corresponding base"
  modified_base 21: /mod_base = "5'-thio thymidine"
  modified_base 1, 2, 6, 7, 9, 10, 13, 15: /mod_base = "2'-hydroxy corresponding base"
gaucuggcaaccauauuuctt

SEQ ID NO: 980 - DNA, 21 bp, artificial sequence
  siRNA reactive to human Eg5
  5'-terminal nucleic acid is a nucleoside, i.e. base + sugar but lacking 5'-phosphate
  modified_base 5, 14: /mod_base = "2'-O-methyl corresponding base"
  modified_base 21: /mod_base = "5'-thio thymidine"
  modified_base 1, 2, 3, 4, 6, 7, 8, 9, 10, 11, 12, 13, 15, 16, 17, 18, 19: /mod_base = "2'-hydroxy corresponding base"
gaaauaugguugccagauctt

SEQ ID NO: 981 - DNA, 21 bp, artificial sequence
  siRNA reactive to human Eg5
  5'-terminal nucleic acid is a nucleoside, i.e. base + sugar but lacking 5'-phosphate
  modified_base 1, 4, 7, 8, 10, 12, 13, 14, 15, 16: /mod_base = "2'-O-methyl corresponding base"
  modified_base 21: /mod_base = "5'-thio thymidine"
  modified_base 2, 3, 5, 6, 9, 11, 17, 18, 19: /mod_base = "2'-hydroxy corresponding base"
uggcaaccauauuucuggatt

SEQ ID NO: 982 - DNA, 21 bp, artificial sequence
  siRNA reactive to human Eg5
  5'-terminal nucleic acid is a nucleoside, i.e. base + sugar but lacking 5'-phosphate
  modified_base 3, 9, 18: /mod_base = "2'-O-methyl corresponding base"
  modified_base 21: /mod_base = "5'-thio thymidine"
  modified_base 1, 2, 4, 5, 6, 7, 8, 10, 11, 12, 13, 14, 15, 16, 17, 19: /mod_base = "2'-hydroxy corresponding base"
uccagaaauaugguugccatt

SEQ ID NO: 983 - DNA, 21 bp, artificial sequence
  siRNA reactive to human Eg5
  5'-terminal nucleic acid is a nucleoside, i.e. base + sugar but lacking 5'-phosphate
  modified_base 3, 5, 6, 7, 9, 10, 15, 17, 18: /mod_base = "2'-O-methyl corresponding base"
  modified_base 21: /mod_base = "5'-thio thymidine"
  modified_base 1, 2, 4, 8, 11, 12, 13, 14, 16, 19: /mod_base = "2'-hydroxy corresponding base"
gauguuuaccgaaguguugtt

SEQ ID NO: 984 - DNA, 21 bp, artificial sequence
  siRNA reactive to human Eg5
  5'-terminal nucleic acid is a nucleoside, i.e. base + sugar but lacking 5'-phosphate
  modified_base 1, 4, 12, 16: /mod_base = "2'-O-methyl corresponding base"
  modified_base 21: /mod_base = "5'-thio thymidine"
  modified_base 2, 3, 5, 6, 7, 8, 9, 10, 11, 13, 14, 15, 17, 18, 19: /mod_base = "2'-hydroxy corresponding base"
caacacuucgguaaacauctt

SEQ ID NO: 985 - DNA, 21 bp, artificial sequence
  siRNA reactive to human Eg5
  5'-terminal nucleic acid is a nucleoside, i.e. base + sugar but lacking 5'-phosphate
  modified_base 1, 2, 3, 4, 5, 6, 8, 9, 15, 16, 17: /mod_base = "2'-O-methyl corresponding base"
  modified_base 21: /mod_base = "5'-thio thymidine"
  modified_base 7, 10, 11, 12, 13, 14, 18, 19: /mod_base = "2'-hydroxy corresponding base"
uuccuuaucgagaaucuaatt

SEQ ID NO: 986 - DNA, 21 bp, artificial sequence
  siRNA reactive to human Eg5
  5'-terminal nucleic acid is a nucleoside, i.e. base + sugar but lacking 5'-phosphate
  modified_base 2, 13: /mod_base = "2'-O-methyl corresponding base"
  modified_base 21: /mod_base = "5'-thio thymidine"
  modified_base 1, 3, 4, 5, 6, 7, 8, 9, 10, 11, 12, 14, 15, 16, 17, 18, 19: /mod_base = "2'-hydroxy corresponding base"
uuagauucucgauaaggaatt

SEQ ID NO: 987 - DNA, 21 bp, artificial sequence
  siRNA reactive to human Eg5
  5'-terminal nucleic acid is a nucleoside, i.e. base + sugar but lacking 5'-phosphate
  modified_base 3, 4, 5, 8, 9, 11, 12, 13, 14, 15, 16: /mod_base = "2'-O-methyl corresponding base"
  modified_base 21: /mod_base = "5'-thio thymidine"
  modified_base 1, 2, 6, 7, 10, 17, 18, 19: /mod_base = "2'-hydroxy corresponding base"
agcuuaauugcuuucuggatt

SEQ ID NO: 988 - DNA, 21 bp, artificial sequence
  siRNA reactive to human Eg5
  5'-terminal nucleic acid is a nucleoside, i.e. base + sugar but lacking 5'-phosphate
  modified_base 3, 10, 14: /mod_base = "2'-O-methyl corresponding base"
  modified_base 21: /mod_base = "5'-thio thymidine"
  modified_base 1, 2, 4, 5, 6, 7, 8, 9, 11, 12, 13, 15, 16, 17, 18, 19: /mod_base = "2'-hydroxy corresponding base"
uccagaaagcaauuaagcutt

SEQ ID NO: 989 - DNA, 21 bp, artificial sequence
  siRNA reactive to human Eg5
  5'-terminal nucleic acid is a nucleoside, i.e. base + sugar but lacking 5'-phosphate
  modified_base 1, 2, 4, 5, 7, 8, 10, 17, 18: /mod_base = "2'-O-methyl corresponding base"
  modified_base 21: /mod_base = "5'-thio thymidine"
  modified_base 3, 6, 9, 11, 12, 13, 14, 15, 16, 19: /mod_base = "2'-hydroxy corresponding base"
uugcuauuaugggagaccatt

SEQ ID NO: 990 - DNA, 21 bp, artificial sequence
  siRNA reactive to human Eg5
  5'-terminal nucleic acid is a nucleoside, i.e. base + sugar but lacking 5'-phosphate
  modified_base 9, 11, 14, 17: /mod_base = "2'-O-methyl corresponding base"
  modified_base 21: /mod_base = "5'-thio thymidine"
  modified_base 1, 2, 3, 4, 5, 6, 7, 8, 10, 12, 13, 15, 16, 18, 19: /mod_base = "2'-hydroxy corresponding base"
uggucucccauaauagcaatt

SEQ ID NO: 991 - DNA, 21 bp, artificial sequence
  siRNA reactive to human Eg5
  5'-terminal nucleic acid is a nucleoside, i.e. base + sugar but lacking 5'-phosphate
  modified_base 2, 3, 5, 8, 10, 11, 13, 16, 17: /mod_base = "2'-O-methyl corresponding base"
  modified_base 21: /mod_base = "5'-thio thymidine"
  modified_base 1, 4, 6, 7, 9, 12, 14, 15, 18, 19: /mod_base = "2'-hydroxy corresponding base"
gucauggcgucgcagccaatt

SEQ ID NO: 992 - DNA, 21 bp, artificial sequence
  siRNA reactive to human Eg5
  5'-terminal nucleic acid is a nucleoside, i.e. base + sugar but lacking 5'-phosphate
  modified_base 14: /mod_base = "2'-O-methyl corresponding base"
  modified_base 21: /mod_base = "5'-thio thymidine"
  modified_base 1, 2, 3, 4, 5, 6, 7, 8, 9, 10, 11, 12, 13, 15, 16, 17, 18, 19: /mod_base = "2'-hydroxy corresponding base"
uuggcugcgacgccaugactt

SEQ ID NO: 993 - DNA, 21 bp, artificial sequence
  siRNA reactive to human Eg5
  5'-terminal nucleic acid is a nucleoside, i.e. base + sugar but lacking 5'-phosphate
  modified_base 1, 4, 5, 7, 9, 10, 12, 13, 14, 15, 16, 18: /mod_base = "2'-O-methyl corresponding base"
  modified_base 21: /mod_base = "5'-thio thymidine"
  modified_base 2, 3, 6, 8, 11, 17, 19: /mod_base = "2'-hydroxy corresponding base"
uaauugcacuaucuuugcgtt

SEQ ID NO: 994 - DNA, 21 bp, artificial sequence
  siRNA reactive to human Eg5
  5'-terminal nucleic acid is a nucleoside, i.e. base + sugar but lacking 5'-phosphate
  modified_base 3, 9, 14, 18: /mod_base = "2'-O-methyl corresponding base"
  modified_base 21: /mod_base = "5'-thio thymidine"
  modified_base 1, 2, 4, 5, 6, 7, 8, 10, 11, 12, 13, 15, 16, 17, 19: /mod_base = "2'-hydroxy corresponding base"
cgcaaagauagugcaauuatt

SEQ ID NO: 995 - DNA, 21 bp, artificial sequence
  siRNA reactive to human Eg5
  5'-terminal nucleic acid is a nucleoside, i.e. base + sugar but lacking 5'-phosphate
  modified_base 1, 2, 4, 5, 6, 7, 8, 10, 12, 14, 17, 18: /mod_base = "2'-O-methyl corresponding base"
  modified_base 21: /mod_base = "5'-thio thymidine"
  modified_base 3, 9, 11, 13, 15, 16, 19: /mod_base = "2'-hydroxy corresponding base"
cuaucuuugcguauggccatt

SEQ ID NO: 996 - DNA, 21 bp, artificial sequence
  siRNA reactive to human Eg5
  5'-terminal nucleic acid is a nucleoside, i.e. base + sugar but lacking 5'-phosphate
  modified_base 5, 7, 11, 17: /mod_base = "2'-O-methyl corresponding base"
  modified_base 21: /mod_base = "5'-thio thymidine"
  modified_base 1, 2, 3, 4, 6, 8, 9, 10, 12, 13, 14, 15, 16, 18, 19: /mod_base = "2'-hydroxy corresponding base"
uggccauacgcaaagauagtt

SEQ ID NO: 997 - DNA, 21 bp, artificial sequence
  siRNA reactive to human Eg5
  5'-terminal nucleic acid is a nucleoside, i.e. base + sugar but lacking 5'-phosphate
  modified_base 1, 2, 3, 4, 5, 7, 10, 11, 12, 14, 15, 16, 17, 19: /mod_base = "2'-O-methyl corresponding base"
  modified_base 21: /mod_base = "5'-thio thymidine"
  modified_base 6, 8, 9, 13, 18: /mod_base = "2'-hydroxy corresponding base"
ucccuauaguucacuuugutt

SEQ ID NO: 998 - DNA, 21 bp, artificial sequence
  siRNA reactive to human Eg5
  5'-terminal nucleic acid is a nucleoside, i.e. base + sugar but lacking 5'-phosphate
  modified_base 2, 12, 14: /mod_base = "2'-O-methyl corresponding base"
  modified_base 21: /mod_base = "5'-thio thymidine"
  modified_base 1, 3, 4, 5, 6, 7, 8, 9, 10, 11, 13, 15, 16, 17, 18, 19: /mod_base = "2'-hydroxy corresponding base"
acaaagugaacuauagggatt

SEQ ID NO: 999 - DNA, 21 bp, artificial sequence
  siRNA reactive to human Eg5
  5'-terminal nucleic acid is a nucleoside, i.e. base + sugar but lacking 5'-phosphate
  modified_base 1, 2, 5, 6, 7, 8, 9, 12, 13, 14, 16, 17, 18: /mod_base = "2'-O-methyl corresponding base"
  modified_base 21: /mod_base = "5'-thio thymidine"
  modified_base 3, 4, 10, 11, 15, 19: /mod_base = "2'-hydroxy corresponding base"
ucaaccuuuaauucacuugtt

SEQ ID NO: 1000 - DNA, 21 bp, artificial sequence
  siRNA reactive to human Eg5
  5'-terminal nucleic acid is a nucleoside, i.e. base + sugar but lacking 5'-phosphate
  modified_base 1, 10: /mod_base = "2'-O-methyl corresponding base"
  modified_base 21: /mod_base = "5'-thio thymidine"
  modified_base 2, 3, 4, 5, 6, 7, 8, 9, 11, 12, 13, 14, 15, 16, 17, 18, 19: /mod_base = "2'-hydroxy corresponding base"
caagugaauuaaagguugatt

SEQ ID NO: 1001 - DNA, 21 bp, artificial sequence
  siRNA reactive to human Eg5
  5'-terminal nucleic acid is a nucleoside, i.e. base + sugar but lacking 5'-phosphate
  modified_base 3, 6, 7, 9, 11, 12, 13, 14, 15: /mod_base = "2'-O-methyl corresponding base"
  modified_base 21: /mod_base = "5'-thio thymidine"
  modified_base 1, 2, 4, 5, 8, 10, 16, 17, 18, 19: /mod_base = "2'-hydroxy corresponding base"
ggcaaccauauuucuggaatt

SEQ ID NO: 1002 - DNA, 21 bp, artificial sequence
  siRNA reactive to human Eg5
  5'-terminal nucleic acid is a nucleoside, i.e. base + sugar but lacking 5'-phosphate
  modified_base 4, 10: /mod_base = "2'-O-methyl corresponding base"
  modified_base 21: /mod_base = "5'-thio thymidine"
  modified_base 1, 2, 3, 5, 6, 7, 8, 9, 11, 12, 13, 14, 15, 16, 17, 18, 19: /mod_base = "2'-hydroxy corresponding base"
uuccagaaauaugguugcctt

SEQ ID NO: 1003 - DNA, 21 bp, artificial sequence
  siRNA reactive to human Eg5
  5'-terminal nucleic acid is a nucleoside, i.e. base + sugar but lacking 5'-phosphate
  modified_base 2, 4, 6, 7, 8, 13, 14, 17, 18, 19: /mod_base = "2'-O-methyl corresponding base"
  modified_base 21: /mod_base = "5'-thio thymidine"
  modified_base 1, 3, 5, 9, 10, 11, 12, 15, 16: /mod_base = "2'-hydroxy corresponding base"
auguacucaagacugaucutt

SEQ ID NO: 1004 - DNA, 21 bp, artificial sequence
  siRNA reactive to human Eg5
  5'-terminal nucleic acid is a nucleoside, i.e. base + sugar but lacking 5'-phosphate
  modified_base 5, 15, 17: /mod_base = "2'-O-methyl corresponding base"
  modified_base 21: /mod_base = "5'-thio thymidine"
  modified_base 1, 2, 3, 4, 6, 7, 8, 9, 10, 11, 12, 13, 14, 16, 18, 19: /mod_base = "2'-hydroxy corresponding base"
agaucagucuugaguacautt

SEQ ID NO: 1005 - DNA, 21 bp, artificial sequence
  siRNA reactive to human Eg5
  5'-terminal nucleic acid is a nucleoside, i.e. base + sugar but lacking 5'-phosphate
  modified_base 2, 6, 7, 9, 10, 11, 14, 15, 16, 19: /mod_base = "2'-O-methyl corresponding base"
  modified_base 21: /mod_base = "5'-thio thymidine"
  modified_base 1, 3, 4, 5, 8, 12, 13, 17, 18: /mod_base = "2'-hydroxy corresponding base"
gcagaccauuuaauuuggctt

SEQ ID NO: 1006 - DNA, 21 bp, artificial sequence
  siRNA reactive to human Eg5
  5'-terminal nucleic acid is a nucleoside, i.e. base + sugar but lacking 5'-phosphate
  modified_base 3, 8: /mod_base = "2'-O-methyl corresponding base"
  modified_base 21: /mod_base = "5'-thio thymidine"
  modified_base 1, 2, 4, 5, 6, 7, 9, 10, 11, 12, 13, 14, 15, 16, 17, 18, 19: /mod_base = "2'-hydroxy corresponding base"
gccaaauuaaauggucugctt

SEQ ID NO: 1007 - DNA, 21 bp, artificial sequence
  siRNA reactive to human Eg5
  5'-terminal nucleic acid is a nucleoside, i.e. base + sugar but lacking 5'-phosphate
  modified_base 1, 2, 3, 10, 11, 13, 17, 19: /mod_base = "2'-O-methyl corresponding base"
  modified_base 21: /mod_base = "5'-thio thymidine"
  modified_base 4, 5, 6, 7, 8, 9, 12, 14, 15, 16, 18: /mod_base = "2'-hydroxy corresponding base"
ucugagagacuacagaugutt

SEQ ID NO: 1008 - DNA, 21 bp, artificial sequence
  siRNA reactive to human Eg5
  5'-terminal nucleic acid is a nucleoside, i.e. base + sugar but lacking 5'-phosphate
  modified_base 2, 8, 16: /mod_base = "2'-O-methyl corresponding base"
  modified_base 21: /mod_base = "5'-thio thymidine"
  modified_base 1, 3, 4, 5, 6, 7, 9, 10, 11, 12, 13, 14, 15, 17, 18, 19: /mod_base = "2'-hydroxy corresponding base"
acaucuguagucucucagatt

SEQ ID NO: 1009 - DNA, 21 bp, artificial sequence
  siRNA reactive to human Eg5
  5'-terminal nucleic acid is a nucleoside, i.e. base + sugar but lacking 5'-phosphate
  modified_base 1, 3, 4, 5, 7, 12, 19: /mod_base = "2'-O-methyl corresponding base"
  modified_base 21: /mod_base = "5'-thio thymidine"
  modified_base 2, 6, 8, 9, 10, 11, 13, 14, 15, 16, 17, 18: /mod_base = "2'-hydroxy corresponding base"
ugcucauagagcaaagaactt

SEQ ID NO: 1010 - DNA, 21 bp, artificial sequence
  siRNA reactive to human Eg5
  5'-terminal nucleic acid is a nucleoside, i.e. base + sugar but lacking 5'-phosphate
  modified_base 12, 18: /mod_base = "2'-O-methyl corresponding base"
  modified_base 21: /mod_base = "5'-thio thymidine"
  modified_base 1, 2, 3, 4, 5, 6, 7, 8, 9, 10, 11, 13, 14, 15, 16, 17, 19: /mod_base = "2'-hydroxy corresponding base"
guucuuugcucuaugagcatt

SEQ ID NO: 1011 - DNA, 21 bp, artificial sequence
  siRNA reactive to human Eg5
  5'-terminal nucleic acid is a nucleoside, i.e. base + sugar but lacking 5'-phosphate
  modified_base 2, 4, 9, 10, 11, 12, 14, 15, 16, 19: /mod_base = "2'-O-methyl corresponding base"
  modified_base 21: /mod_base = "5'-thio thymidine"
  modified_base 1, 3, 5, 6, 7, 8, 13, 17, 18: /mod_base = "2'-hydroxy corresponding base"
acauaagaccuuauuuggutt

SEQ ID NO: 1012 - DNA, 21 bp, artificial sequence
  siRNA reactive to human Eg5
  5'-terminal nucleic acid is a nucleoside, i.e. base + sugar but lacking 5'-phosphate
  modified_base 3, 7, 15: /mod_base = "2'-O-methyl corresponding base"
  modified_base 21: /mod_base = "5'-thio thymidine"
  modified_base 1, 2, 4, 5, 6, 8, 9, 10, 11, 12, 13, 14, 16, 17, 18, 19: /mod_base = "2'-hydroxy corresponding base"
accaaauaaggucuuaugutt

SEQ ID NO: 1013 - DNA, 21 bp, artificial sequence
  siRNA reactive to human Eg5
  5'-terminal nucleic acid is a nucleoside, i.e. base + sugar but lacking 5'-phosphate
  modified_base 1, 2, 3, 5, 7, 8, 11, 12, 13, 14, 17: /mod_base = "2'-O-methyl corresponding base"
  modified_base 21: /mod_base = "5'-thio thymidine"
  modified_base 4, 6, 9, 10, 15, 16, 18, 19: /mod_base = "2'-hydroxy corresponding base"
uuugugcugauucugauggtt

SEQ ID NO: 1014 - DNA, 21 bp, artificial sequence
  siRNA reactive to human Eg5
  5'-terminal nucleic acid is a nucleoside, i.e. base + sugar but lacking 5'-phosphate
  modified_base 2, 5, 11, 14, 16: /mod_base = "2'-O-methyl corresponding base"
  modified_base 21: /mod_base = "5'-thio thymidine"
  modified_base 1, 3, 4, 6, 7, 8, 9, 10, 12, 13, 15, 17, 18, 19: /mod_base = "2'-hydroxy corresponding base"
ccaucagaaucagcacaaatt

SEQ ID NO: 1015 - DNA, 21 bp, artificial sequence
  siRNA reactive to human Eg5
  5'-terminal nucleic acid is a nucleoside, i.e. base + sugar but lacking 5'-phosphate
  modified_base 1, 2, 4, 5, 8, 10, 11, 14: /mod_base = "2'-O-methyl corresponding base"
  modified_base 21: /mod_base = "5'-thio thymidine"
  modified_base 3, 6, 7, 9, 12, 13, 15, 16, 17, 18, 19: /mod_base = "2'-hydroxy corresponding base"
ccaucaacacugguaagaatt

SEQ ID NO: 1016 - DNA, 21 bp, artificial sequence
  siRNA reactive to human Eg5
  5'-terminal nucleic acid is a nucleoside, i.e. base + sugar but lacking 5'-phosphate
  modified_base 5, 8: /mod_base = "2'-O-methyl corresponding base"
  modified_base 21: /mod_base = "5'-thio thymidine"
  modified_base 1, 2, 3, 4, 6, 7, 9, 10, 11, 12, 13, 14, 15, 16, 17, 18, 19: /mod_base = "2'-hydroxy corresponding base"
uucuuaccaguguugauggtt

SEQ ID NO: 1017 - DNA, 21 bp, artificial sequence
  siRNA reactive to human Eg5
  5'-terminal nucleic acid is a nucleoside, i.e. base + sugar but lacking 5'-phosphate
  modified_base 4, 7, 8, 9, 10, 14, 16: /mod_base = "2'-O-methyl corresponding base"
  modified_base 21: /mod_base = "5'-thio thymidine"
  modified_base 1, 2, 3, 5, 6, 11, 12, 13, 15, 17, 18, 19: /mod_base = "2'-hydroxy corresponding base"
agacaauuccggauguggatt

SEQ ID NO: 1018 - DNA, 21 bp, artificial sequence
  siRNA reactive to human Eg5
  5'-terminal nucleic acid is a nucleoside, i.e. base + sugar but lacking 5'-phosphate
  modified_base 3, 5: /mod_base = "2'-O-methyl corresponding base"
  modified_base 21: /mod_base = "5'-thio thymidine"
  modified_base 1, 2, 4, 6, 7, 8, 9, 10, 11, 12, 13, 14, 15, 16, 17, 18, 19: /mod_base = "2'-hydroxy corresponding base"
uccacauccggaauugucutt

SEQ ID NO: 1019 - DNA, 21 bp, artificial sequence
  siRNA reactive to human Eg5
  5'-terminal nucleic acid is a nucleoside, i.e. base + sugar but lacking 5'-phosphate
  modified_base 4, 5, 6, 10, 11, 12, 13, 15, 17, 19: /mod_base = "2'-O-methyl corresponding base"
  modified_base 21: /mod_base = "5'-thio thymidine"
  modified_base 1, 2, 3, 7, 8, 9, 14, 16, 18: /mod_base = "2'-hydroxy corresponding base"
gaacuugagccuuguguautt

SEQ ID NO: 1020 - DNA, 21 bp, artificial sequence
  siRNA reactive to human Eg5
  5'-terminal nucleic acid is a nucleoside, i.e. base + sugar but lacking 5'-phosphate
  modified_base 2, 4, 6, 13: /mod_base = "2'-O-methyl corresponding base"
  modified_base 21: /mod_base = "5'-thio thymidine"
  modified_base 1, 3, 5, 7, 8, 9, 10, 11, 12, 14, 15, 16, 17, 18, 19: /mod_base = "2'-hydroxy corresponding base"
auacacaaggcucaaguuctt

SEQ ID NO: 1021 - DNA, 21 bp, artificial sequence
  siRNA reactive to human Eg5
  5'-terminal nucleic acid is a nucleoside, i.e. base + sugar but lacking 5'-phosphate
  modified_base 1, 4, 5, 6, 9, 14: /mod_base = "2'-O-methyl corresponding base"
  modified_base 21: /mod_base = "5'-thio thymidine"
  modified_base 2, 3, 7, 8, 10, 11, 12, 13, 15, 16, 17, 18, 19: /mod_base = "2'-hydroxy corresponding base"
uaauuuggcagagcggaaatt

SEQ ID NO: 1022 - DNA, 21 bp, artificial sequence
  siRNA reactive to human Eg5
  5'-terminal nucleic acid is a nucleoside, i.e. base + sugar but lacking 5'-phosphate
  modified_base 13, 18: /mod_base = "2'-O-methyl corresponding base"
  modified_base 21: /mod_base = "5'-thio thymidine"
  modified_base 1, 2, 3, 4, 5, 6, 7, 8, 9, 10, 11, 12, 14, 15, 16, 17, 19: /mod_base = "2'-hydroxy corresponding base"
uuuccgcucugccaaauuatt

SEQ ID NO: 1023 - DNA, 21 bp, artificial sequence
  siRNA reactive to human Eg5
  5'-terminal nucleic acid is a nucleoside, i.e. base + sugar but lacking 5'-phosphate
  modified_base 1, 5, 10, 11, 13, 14, 16: /mod_base = "2'-O-methyl corresponding base"
  modified_base 21: /mod_base = "5'-thio thymidine"
  modified_base 2, 3, 4, 6, 7, 8, 9, 12, 15, 17, 18, 19: /mod_base = "2'-hydroxy corresponding base"
uggaugaaguuauuaugggtt

SEQ ID NO: 1024 - DNA, 21 bp, artificial sequence
  siRNA reactive to human Eg5
  5'-terminal nucleic acid is a nucleoside, i.e. base + sugar but lacking 5'-phosphate
  modified_base 3, 5, 8, 14, 18: /mod_base = "2'-O-methyl corresponding base"
  modified_base 21: /mod_base = "5'-thio thymidine"
  modified_base 1, 2, 4, 6, 7, 9, 10, 11, 12, 13, 15, 16, 17, 19: /mod_base = "2'-hydroxy corresponding base"
cccauaauaacuucauccatt

SEQ ID NO: 1025 - DNA, 21 bp, artificial sequence
  siRNA reactive to human Eg5
  5'-terminal nucleic acid is a nucleoside, i.e. base + sugar but lacking 5'-phosphate
  modified_base 2, 3, 4, 6, 8, 12, 13, 15: /mod_base = "2'-O-methyl corresponding base"
  modified_base 21: /mod_base = "5'-thio thymidine"
  modified_base 1, 5, 7, 9, 10, 11, 14, 16, 17, 18, 19: /mod_base = "2'-hydroxy corresponding base"
aucuacaugaacuacaagatt

SEQ ID NO: 1026 - DNA, 21 bp, artificial sequence
  siRNA reactive to human Eg5
  5'-terminal nucleic acid is a nucleoside, i.e. base + sugar but lacking 5'-phosphate
  modified_base 6, 11, 15: /mod_base = "2'-O-methyl corresponding base"
  modified_base 21: /mod_base = "5'-thio thymidine"
  modified_base 1, 2, 3, 4, 5, 7, 8, 9, 10, 12, 13, 14, 16, 17, 18, 19: /mod_base = "2'-hydroxy corresponding base"
ucuuguaguucauguagautt

SEQ ID NO: 1027 - DNA, 21 bp, artificial sequence
  siRNA reactive to human Eg5
  5'-terminal nucleic acid is a nucleoside, i.e. base + sugar but lacking 5'-phosphate
  modified_base 3, 5, 6, 7, 8, 9, 12, 13, 14, 17: /mod_base = "2'-O-methyl corresponding base"
  modified_base 21: /mod_base = "5'-thio thymidine"
  modified_base 1, 2, 4, 10, 11, 15, 16, 18, 19: /mod_base = "2'-hydroxy corresponding base"
gguauuuuugaucuggcaatt

SEQ ID NO: 1028 - DNA, 21 bp, artificial sequence
  siRNA reactive to human Eg5
  5'-terminal nucleic acid is a nucleoside, i.e. base + sugar but lacking 5'-phosphate
  modified_base 5, 10, 16: /mod_base = "2'-O-methyl corresponding base"
  modified_base 21: /mod_base = "5'-thio thymidine"
  modified_base 1, 2, 3, 4, 6, 7, 8, 9, 11, 12, 13, 14, 15, 17, 18, 19: /mod_base = "2'-hydroxy corresponding base"
uugccagaucaaaaauacctt

SEQ ID NO: 1029 - DNA, 21 bp, artificial sequence
  siRNA reactive to human Eg5
  5'-terminal nucleic acid is a nucleoside, i.e. base + sugar but lacking 5'-phosphate
  modified_base 1, 2, 5, 12, 14, 16, 17, 18: /mod_base = "2'-O-methyl corresponding base"
  modified_base 21: /mod_base = "5'-thio thymidine"
  modified_base 3, 4, 6, 7, 8, 9, 10, 11, 13, 15, 19: /mod_base = "2'-hydroxy corresponding base"
cuaaugaagaguauaccugtt

SEQ ID NO: 1030 - DNA, 21 bp, artificial sequence
  siRNA reactive to human Eg5
  5'-terminal nucleic acid is a nucleoside, i.e. base + sugar but lacking 5'-phosphate
  modified_base 1, 5, 7, 14, 17: /mod_base = "2'-O-methyl corresponding base"
  modified_base 21: /mod_base = "5'-thio thymidine"
  modified_base 2, 3, 4, 6, 8, 9, 10, 11, 12, 13, 15, 16, 18, 19: /mod_base = "2'-hydroxy corresponding base"
cagguauacucuucauuagtt

SEQ ID NO: 1031 - DNA, 21 bp, artificial sequence
  siRNA reactive to human Eg5
  5'-terminal nucleic acid is a nucleoside, i.e. base + sugar but lacking 5'-phosphate
  modified_base 1, 2, 3, 10, 11, 12, 14, 15, 18: /mod_base = "2'-O-methyl corresponding base"
  modified_base 21: /mod_base = "5'-thio thymidine"
  modified_base 4, 5, 6, 7, 8, 9, 13, 16, 17, 19: /mod_base = "2'-hydroxy corresponding base"
uuugagaaacuuacugauatt

SEQ ID NO: 1032 - DNA, 21 bp, artificial sequence
  siRNA reactive to human Eg5
  5'-terminal nucleic acid is a nucleoside, i.e. base + sugar but lacking 5'-phosphate
  modified_base 1, 4, 7, 16: /mod_base = "2'-O-methyl corresponding base"
  modified_base 21: /mod_base = "5'-thio thymidine"
  modified_base 2, 3, 5, 6, 8, 9, 10, 11, 12, 13, 14, 15, 17, 18, 19: /mod_base = "2'-hydroxy corresponding base"
uaucaguaaguuucucaaatt

SEQ ID NO: 1033 - DNA, 21 bp, artificial sequence
  siRNA reactive to human Eg5
  5'-terminal nucleic acid is a nucleoside, i.e. base + sugar but lacking 5'-phosphate
  modified_base 1, 4, 9, 16, 17: /mod_base = "2'-O-methyl corresponding base"
  modified_base 21: /mod_base = "5'-thio thymidine"
  modified_base 2, 3, 5, 6, 7, 8, 10, 11, 12, 13, 14, 15, 18, 19: /mod_base = "2'-hydroxy corresponding base"
cgauaagauagaagaucaatt

SEQ ID NO: 1034 - DNA, 21 bp, artificial sequence
  siRNA reactive to human Eg5
  5'-terminal nucleic acid is a nucleoside, i.e. base + sugar but lacking 5'-phosphate
  modified_base 10, 15: /mod_base = "2'-O-methyl corresponding base"
  modified_base 21: /mod_base = "5'-thio thymidine"
  modified_base 1, 2, 3, 4, 5, 6, 7, 8, 9, 11, 12, 13, 14, 16, 17, 18, 19: /mod_base = "2'-hydroxy corresponding base"
uugaucuucuaucuuaucgtt

SEQ ID NO: 1035 - DNA, 21 bp, artificial sequence
  siRNA reactive to human Eg5
  5'-terminal nucleic acid is a nucleoside, i.e. base + sugar but lacking 5'-phosphate
  modified_base 1, 2, 5, 8, 9, 11, 13, 14, 15, 16, 17: /mod_base = "2'-O-methyl corresponding base"
  modified_base 21: /mod_base = "5'-thio thymidine"
  modified_base 3, 4, 6, 7, 10, 12, 18, 19: /mod_base = "2'-hydroxy corresponding base"
cuggcaaccauauuucuggtt

SEQ ID NO: 1036 - DNA, 21 bp, artificial sequence
  siRNA reactive to human Eg5
  5'-terminal nucleic acid is a nucleoside, i.e. base + sugar but lacking 5'-phosphate
  modified_base 2, 8, 17: /mod_base = "2'-O-methyl corresponding base"
  modified_base 21: /mod_base = "5'-thio thymidine"
  modified_base 1, 3, 4, 5, 6, 7, 9, 10, 11, 12, 13, 14, 15, 16, 18, 19: /mod_base = "2'-hydroxy corresponding base"
ccagaaauaugguugccagtt

SEQ ID NO: 1037 - DNA, 21 bp, artificial sequence
  siRNA reactive to human Eg5
  5'-terminal nucleic acid is a nucleoside, i.e. base + sugar but lacking 5'-phosphate
  modified_base 1, 5, 7, 8, 10, 11, 13, 14, 16, 19: /mod_base = "2'-O-methyl corresponding base"
  modified_base 21: /mod_base = "5'-thio thymidine"
  modified_base 2, 3, 4, 6, 9, 12, 15, 17, 18: /mod_base = "2'-hydroxy corresponding base"
uagauaccauuacuacagutt

SEQ ID NO: 1038 - DNA, 21 bp, artificial sequence
  siRNA reactive to human Eg5
  5'-terminal nucleic acid is a nucleoside, i.e. base + sugar but lacking 5'-phosphate
  modified_base 5, 8, 14, 18: /mod_base = "2'-O-methyl corresponding base"
  modified_base 21: /mod_base = "5'-thio thymidine"
  modified_base 1, 2, 3, 4, 6, 7, 9, 10, 11, 12, 13, 15, 16, 17, 19: /mod_base = "2'-hydroxy corresponding base"
acuguaguaaugguaucuatt

SEQ ID NO: 1039 - DNA, 21 bp, artificial sequence
  siRNA reactive to human Eg5
  5'-terminal nucleic acid is a nucleoside, i.e. base + sugar but lacking 5'-phosphate
  modified_base 2, 4, 5, 9, 10, 14, 15, 16, 17, 19: /mod_base = "2'-O-methyl corresponding base"
  modified_base 21: /mod_base = "5'-thio thymidine"
  modified_base 1, 3, 6, 7, 8, 11, 12, 13, 18: /mod_base = "2'-hydroxy corresponding base"
guauuaaauuggguuucautt

SEQ ID NO: 1040 - DNA, 21 bp, artificial sequence
  siRNA reactive to human Eg5
  5'-terminal nucleic acid is a nucleoside, i.e. base + sugar but lacking 5'-phosphate
  modified_base 9, 14, 17: /mod_base = "2'-O-methyl corresponding base"
  modified_base 21: /mod_base = "5'-thio thymidine"
  modified_base 1, 2, 3, 4, 5, 6, 7, 8, 10, 11, 12, 13, 15, 16, 18, 19: /mod_base = "2'-hydroxy corresponding base"
augaaacccaauuuaauactt

SEQ ID NO: 1041 - DNA, 21 bp, artificial sequence
  siRNA reactive to human Eg5
  5'-terminal nucleic acid is a nucleoside, i.e. base + sugar but lacking 5'-phosphate
  modified_base 5, 6, 7, 8, 10, 11, 12, 15, 18, 19: /mod_base = "2'-O-methyl corresponding base"
  modified_base 21: /mod_base = "5'-thio thymidine"
  modified_base 1, 2, 3, 4, 9, 13, 14, 16, 17: /mod_base = "2'-hydroxy corresponding base"
aagaccuuauuugguaauctt

SEQ ID NO: 1042 - DNA, 21 bp, artificial sequence
  siRNA reactive to human Eg5
  5'-terminal nucleic acid is a nucleoside, i.e. base + sugar but lacking 5'-phosphate
  modified_base 4, 7, 11: /mod_base = "2'-O-methyl corresponding base"
  modified_base 21: /mod_base = "5'-thio thymidine"
  modified_base 1, 2, 3, 5, 6, 8, 9, 10, 12, 13, 14, 15, 16, 17, 18, 19: /mod_base = "2'-hydroxy corresponding base"
gauuaccaaauaaggucuutt

SEQ ID NO: 1043 - DNA, 21 bp, artificial sequence
  siRNA reactive to human Eg5
  5'-terminal nucleic acid is a nucleoside, i.e. base + sugar but lacking 5'-phosphate
  modified_base 2, 3, 5, 6, 9, 17, 18, 19: /mod_base = "2'-O-methyl corresponding base"
  modified_base 21: /mod_base = "5'-thio thymidine"
  modified_base 1, 4, 7, 8, 10, 11, 12, 13, 14, 15, 16: /mod_base = "2'-hydroxy corresponding base"
gcuguugauaagagagcuctt

SEQ ID NO: 1044 - DNA, 21 bp, artificial sequence
  siRNA reactive to human Eg5
  5'-terminal nucleic acid is a nucleoside, i.e. base + sugar but lacking 5'-phosphate
  modified_base 10, 13, 16: /mod_base = "2'-O-methyl corresponding base"
  modified_base 21: /mod_base = "5'-thio thymidine"
  modified_base 1, 2, 3, 4, 5, 6, 7, 8, 9, 11, 12, 14, 15, 17, 18, 19: /mod_base = "2'-hydroxy corresponding base"
gagcucucuuaucaacagctt

SEQ ID NO: 1045 - DNA, 21 bp, artificial sequence
  siRNA reactive to human Eg5
  5'-terminal nucleic acid is a nucleoside, i.e. base + sugar but lacking 5'-phosphate
  modified_base 1, 3, 4, 5, 7, 9, 10, 11, 12, 13, 14, 18, 19: /mod_base = "2'-O-methyl corresponding base"
  modified_base 21: /mod_base = "5'-thio thymidine"
  modified_base 2, 6, 8, 15, 16, 17: /mod_base = "2'-hydroxy corresponding base"
uacucauguuucucagauutt

SEQ ID NO: 1046 - DNA, 21 bp, artificial sequence
  siRNA reactive to human Eg5
  5'-terminal nucleic acid is a nucleoside, i.e. base + sugar but lacking 5'-phosphate
  modified_base 12, 18: /mod_base = "2'-O-methyl corresponding base"
  modified_base 21: /mod_base = "5'-thio thymidine"
  modified_base 1, 2, 3, 4, 5, 6, 7, 8, 9, 10, 11, 13, 14, 15, 16, 17, 19: /mod_base = "2'-hydroxy corresponding base"
aaucugagaaacaugaguatt

SEQ ID NO: 1047 - DNA, 21 bp, artificial sequence
  siRNA reactive to human Eg5
  5'-terminal nucleic acid is a nucleoside, i.e. base + sugar but lacking 5'-phosphate
  modified_base 1, 5, 9, 11, 16, 19: /mod_base = "2'-O-methyl corresponding base"
  modified_base 21: /mod_base = "5'-thio thymidine"
  modified_base 2, 3, 4, 6, 7, 8, 10, 12, 13, 14, 15, 17, 18: /mod_base = "2'-hydroxy corresponding base"
cagauggacguaaggcagctt

SEQ ID NO: 1048 - DNA, 21 bp, artificial sequence
  siRNA reactive to human Eg5
  5'-terminal nucleic acid is a nucleoside, i.e. base + sugar but lacking 5'-phosphate
  modified_base 8, 14: /mod_base = "2'-O-methyl corresponding base"
  modified_base 21: /mod_base = "5'-thio thymidine"
  modified_base 1, 2, 3, 4, 5, 6, 7, 9, 10, 11, 12, 13, 15, 16, 17, 18, 19: /mod_base = "2'-hydroxy corresponding base"
gcugccuuacguccaucugtt

SEQ ID NO: 1049 - DNA, 21 bp, artificial sequence
  siRNA reactive to human Eg5
  5'-terminal nucleic acid is a nucleoside, i.e. base + sugar but lacking 5'-phosphate
  modified_base 1, 3, 4, 5, 6, 9, 13, 15, 18: /mod_base = "2'-O-methyl corresponding base"
  modified_base 21: /mod_base = "5'-thio thymidine"
  modified_base 2, 7, 8, 10, 11, 12, 14, 16, 17, 19: /mod_base = "2'-hydroxy corresponding base"
uaucccaacagguacgacatt

SEQ ID NO: 1050 - DNA, 21 bp, artificial sequence
  siRNA reactive to human Eg5
  5'-terminal nucleic acid is a nucleoside, i.e. base + sugar but lacking 5'-phosphate
  modified_base 6, 18: /mod_base = "2'-O-methyl corresponding base"
  modified_base 21: /mod_base = "5'-thio thymidine"
  modified_base 1, 2, 3, 4, 5, 7, 8, 9, 10, 11, 12, 13, 14, 15, 16, 17, 19: /mod_base = "2'-hydroxy corresponding base"
ugucguaccuguugggauatt

SEQ ID NO: 1051 - DNA, 21 bp, artificial sequence
  siRNA reactive to human Eg5
  5'-terminal nucleic acid is a nucleoside, i.e. base + sugar but lacking 5'-phosphate
  modified_base 1, 3, 4, 6, 7, 9, 10, 12, 19: /mod_base = "2'-O-methyl corresponding base"
  modified_base 21: /mod_base = "5'-thio thymidine"
  modified_base 2, 5, 8, 11, 13, 14, 15, 16, 17, 18: /mod_base = "2'-hydroxy corresponding base"
cauugcuauuaugggagactt

SEQ ID NO: 1052 - DNA, 21 bp, artificial sequence
  siRNA reactive to human Eg5
  5'-terminal nucleic acid is a nucleoside, i.e. base + sugar but lacking 5'-phosphate
  modified_base 7, 9, 12, 15: /mod_base = "2'-O-methyl corresponding base"
  modified_base 21: /mod_base = "5'-thio thymidine"
  modified_base 1, 2, 3, 4, 5, 6, 8, 10, 11, 13, 14, 16, 17, 18, 19: /mod_base = "2'-hydroxy corresponding base"
gucucccauaauagcaaugtt

SEQ ID NO: 1053 - DNA, 21 bp, artificial sequence
  siRNA reactive to human Eg5
  5'-terminal nucleic acid is a nucleoside, i.e. base + sugar but lacking 5'-phosphate
  modified_base 1, 2, 3, 4, 5, 8, 12, 13, 14, 16, 19: /mod_base = "2'-O-methyl corresponding base"
  modified_base 21: /mod_base = "5'-thio thymidine"
  modified_base 6, 7, 9, 10, 11, 15, 17, 18: /mod_base = "2'-hydroxy corresponding base"
cccucaguaaauccauggutt

SEQ ID NO: 1054 - DNA, 21 bp, artificial sequence
  siRNA reactive to human Eg5
  5'-terminal nucleic acid is a nucleoside, i.e. base + sugar but lacking 5'-phosphate
  modified_base 3, 11: /mod_base = "2'-O-methyl corresponding base"
  modified_base 21: /mod_base = "5'-thio thymidine"
  modified_base 1, 2, 4, 5, 6, 7, 8, 9, 10, 12, 13, 14, 15, 16, 17, 18, 19: /mod_base = "2'-hydroxy corresponding base"
accauggauuuacugagggtt

SEQ ID NO: 1055 - DNA, 21 bp, artificial sequence
  siRNA reactive to human Eg5
  5'-terminal nucleic acid is a nucleoside, i.e. base + sugar but lacking 5'-phosphate
  modified_base 3, 4, 6, 7, 9, 10, 12, 13, 14, 15, 16, 18: /mod_base = "2'-O-methyl corresponding base"
  modified_base 21: /mod_base = "5'-thio thymidine"
  modified_base 1, 2, 5, 8, 11, 17, 19: /mod_base = "2'-hydroxy corresponding base"
ggucauuacugcccuuguatt

SEQ ID NO: 1056 - DNA, 21 bp, artificial sequence
  siRNA reactive to human Eg5
  5'-terminal nucleic acid is a nucleoside, i.e. base + sugar but lacking 5'-phosphate
  modified_base 1, 3, 9, 12: /mod_base = "2'-O-methyl corresponding base"
  modified_base 21: /mod_base = "5'-thio thymidine"
  modified_base 2, 4, 5, 6, 7, 8, 10, 11, 13, 14, 15, 16, 17, 18, 19: /mod_base = "2'-hydroxy corresponding base"
uacaagggcaguaaugacctt

SEQ ID NO: 1057 - DNA, 21 bp, artificial sequence
  siRNA reactive to human Eg5
  5'-terminal nucleic acid is a nucleoside, i.e. base + sugar but lacking 5'-phosphate
  modified_base 3, 4, 6, 7, 8, 14, 16, 17, 18: /mod_base = "2'-O-methyl corresponding base"
  modified_base 21: /mod_base = "5'-thio thymidine"
  modified_base 1, 2, 5, 9, 10, 11, 12, 13, 15, 19: /mod_base = "2'-hydroxy corresponding base"
aaccacucaaaaacauuugtt

SEQ ID NO: 1058 - DNA, 21 bp, artificial sequence
  siRNA reactive to human Eg5
  5'-terminal nucleic acid is a nucleoside, i.e. base + sugar but lacking 5'-phosphate
  modified_base 1: /mod_base = "2'-O-methyl corresponding base"
  modified_base 21: /mod_base = "5'-thio thymidine"
  modified_base 2..19: /mod_base = "2'-hydroxy corresponding base"
caaauguuuuugagugguutt

SEQ ID NO: 1059 - DNA, 21 bp, artificial sequence
  siRNA reactive to human Eg5
  5'-terminal nucleic acid is a nucleoside, i.e. base + sugar but lacking 5'-phosphate
  modified_base 1, 2, 3, 5, 9, 10, 13, 17, 18, 19: /mod_base = "2'-O-methyl corresponding base"
  modified_base 21: /mod_base = "5'-thio thymidine"
  modified_base 4, 6, 7, 8, 11, 12, 14, 15, 16: /mod_base = "2'-hydroxy corresponding base"
uuugcaaguuaaugaaucutt

SEQ ID NO: 1060 - DNA, 21 bp, artificial sequence
  siRNA reactive to human Eg5
  5'-terminal nucleic acid is a nucleoside, i.e. base + sugar but lacking 5'-phosphate
  modified_base 6, 9, 16: /mod_base = "2'-O-methyl corresponding base"
  modified_base 21: /mod_base = "5'-thio thymidine"
  modified_base 1, 2, 3, 4, 5, 7, 8, 10, 11, 12, 13, 14, 15, 17, 18, 19: /mod_base = "2'-hydroxy corresponding base"
agauucauuaacuugcaaatt

SEQ ID NO: 1061 - DNA, 21 bp, artificial sequence
  siRNA reactive to human Eg5
  5'-terminal nucleic acid is a nucleoside, i.e. base + sugar but lacking 5'-phosphate
  modified_base 1, 2, 4, 5, 6, 7, 8, 11, 14, 15: /mod_base = "2'-O-methyl corresponding base"
  modified_base 21: /mod_base = "5'-thio thymidine"
  modified_base 3, 9, 10, 12, 13, 16, 17, 18, 19: /mod_base = "2'-hydroxy corresponding base"
uuauuuucaguagucagaatt

SEQ ID NO: 1062 - DNA, 21 bp, artificial sequence
  siRNA reactive to human Eg5
  5'-terminal nucleic acid is a nucleoside, i.e. base + sugar but lacking 5'-phosphate
  modified_base 8, 17: /mod_base = "2'-O-methyl corresponding base"
  modified_base 21: /mod_base = "5'-thio thymidine"
  modified_base 1, 2, 3, 4, 5, 6, 7, 9, 10, 11, 12, 13, 14, 15, 16, 18, 19: /mod_base = "2'-hydroxy corresponding base"
uucugacuacugaaaauaatt

SEQ ID NO: 1063 - DNA, 21 bp, artificial sequence
  siRNA reactive to human Eg5
  5'-terminal nucleic acid is a nucleoside, i.e. base + sugar but lacking 5'-phosphate
  modified_base 1, 2, 3, 4, 5, 6, 7, 10, 11, 12, 16, 17, 18, 19: /mod_base = "2'-O-methyl corresponding base"
  modified_base 21: /mod_base = "5'-thio thymidine"
  modified_base 8, 9, 13, 14, 15: /mod_base = "2'-hydroxy corresponding base"
uuuucucgauucaaaucuutt

SEQ ID NO: 1064 - DNA, 21 bp, artificial sequence
  siRNA reactive to human Eg5
  5'-terminal nucleic acid is a nucleoside, i.e. base + sugar but lacking 5'-phosphate
  modified_base 7: /mod_base = "2'-O-methyl corresponding base"
  modified_base 21: /mod_base = "5'-thio thymidine"
  modified_base 1, 2, 3, 4, 5, 6, 8, 9, 10, 11, 12, 13, 14, 15, 16, 17, 18, 19: /mod_base = "2'-hydroxy corresponding base"
aagauuugaaucgagaaaatt

SEQ ID NO: 1065 - DNA, 21 bp, artificial sequence
  siRNA reactive to human Eg5
  5'-terminal nucleic acid is a nucleoside, i.e. base + sugar but lacking 5'-phosphate
  modified_base 2, 4, 14, 15, 18: /mod_base = "2'-O-methyl corresponding base"
  modified_base 21: /mod_base = "5'-thio thymidine"
  modified_base 1, 3, 5, 6, 7, 8, 9, 10, 11, 12, 13, 16, 17, 19: /mod_base = "2'-hydroxy corresponding base"
guacgaaaagaaguuagugtt

SEQ ID NO: 1066 - DNA, 21 bp, artificial sequence
  siRNA reactive to human Eg5
  5'-terminal nucleic acid is a nucleoside, i.e. base + sugar but lacking 5'-phosphate
  modified_base 1, 4, 17: /mod_base = "2'-O-methyl corresponding base"
  modified_base 21: /mod_base = "5'-thio thymidine"
  modified_base 2, 3, 5, 6, 7, 8, 9, 10, 11, 12, 13, 14, 15, 16, 18, 19: /mod_base = "2'-hydroxy corresponding base"
cacuaacuucuuuucguactt

SEQ ID NO: 1067 - DNA, 21 bp, artificial sequence
  siRNA reactive to human Eg5
  5'-terminal nucleic acid is a nucleoside, i.e. base + sugar but lacking 5'-phosphate
  modified_base 1, 2, 3, 8, 13, 14, 15, 16, 18, 19: /mod_base = "2'-O-methyl corresponding base"
  modified_base 21: /mod_base = "5'-thio thymidine"
  modified_base 4, 5, 6, 7, 9, 10, 11, 12, 17: /mod_base = "2'-hydroxy corresponding base"
uuuaaaacgagaucuugcutt

SEQ ID NO: 1068 - DNA, 21 bp, artificial sequence
  siRNA reactive to human Eg5
  5'-terminal nucleic acid is a nucleoside, i.e. base + sugar but lacking 5'-phosphate
  modified_base 3, 16: /mod_base = "2'-O-methyl corresponding base"
  modified_base 21: /mod_base = "5'-thio thymidine"
  modified_base 1, 2, 4, 5, 6, 7, 8, 9, 10, 11, 12, 13, 14, 15, 17, 18, 19: /mod_base = "2'-hydroxy corresponding base"
agcaagaucucguuuuaaatt

SEQ ID NO: 1069 - DNA, 21 bp, artificial sequence
  siRNA reactive to human Eg5
  5'-terminal nucleic acid is a nucleoside, i.e. base + sugar but lacking 5'-phosphate
  modified_base 4, 5, 8, 9, 12, 14, 16, 17, 18: /mod_base = "2'-O-methyl corresponding base"
  modified_base 21: /mod_base = "5'-thio thymidine"
  modified_base 1, 2, 3, 6, 7, 10, 11, 13, 15, 19: /mod_base = "2'-hydroxy corresponding base"
gaauugauuaauguacucatt

SEQ ID NO: 1070 - DNA, 21 bp, artificial sequence
  siRNA reactive to human Eg5
  5'-terminal nucleic acid is a nucleoside, i.e. base + sugar but lacking 5'-phosphate
  modified_base 5, 7, 10, 14: /mod_base = "2'-O-methyl corresponding base"
  modified_base 21: /mod_base = "5'-thio thymidine"
  modified_base 1, 2, 3, 4, 6, 8, 9, 11, 12, 13, 15, 16, 17, 18, 19: /mod_base = "2'-hydroxy corresponding base"
ugaguacauuaaucaauuctt

SEQ ID NO: 1071 - DNA, 21 bp, artificial sequence
  siRNA reactive to human Eg5
  5'-terminal nucleic acid is a nucleoside, i.e. base + sugar but lacking 5'-phosphate
  modified_base 3, 7, 9, 14, 17, 18, 19: /mod_base = "2'-O-methyl corresponding base"
  modified_base 21: /mod_base = "5'-thio thymidine"
  modified_base 1, 2, 4, 5, 6, 8, 10, 11, 12, 13, 15, 16: /mod_base = "2'-hydroxy corresponding base"
gauggacguaaggcagcuctt

SEQ ID NO: 1072 - DNA, 21 bp, artificial sequence
  siRNA reactive to human Eg5
  5'-terminal nucleic acid is a nucleoside, i.e. base + sugar but lacking 5'-phosphate
  modified_base 10, 16: /mod_base = "2'-O-methyl corresponding base"
  modified_base 21: /mod_base = "5'-thio thymidine"
  modified_base 1, 2, 3, 4, 5, 6, 7, 8, 9, 11, 12, 13, 14, 15, 17, 18, 19: /mod_base = "2'-hydroxy corresponding base"
gagcugccuuacguccauctt

SEQ ID NO: 1073 - DNA, 21 bp, artificial sequence
  siRNA reactive to human Eg5
  5'-terminal nucleic acid is a nucleoside, i.e. base + sugar but lacking 5'-phosphate
  modified_base 1, 3, 4, 5, 8, 9, 12, 15, 16, 17, 18: /mod_base = "2'-O-methyl corresponding base"
  modified_base 21: /mod_base = "5'-thio thymidine"
  modified_base 2, 6, 7, 10, 11, 13, 14, 19: /mod_base = "2'-hydroxy corresponding base"
caucugacuaauggcucugtt

SEQ ID NO: 1074 - DNA, 21 bp, artificial sequence
  siRNA reactive to human Eg5
  5'-terminal nucleic acid is a nucleoside, i.e. base + sugar but lacking 5'-phosphate
  modified_base 1, 7, 10, 14: /mod_base = "2'-O-methyl corresponding base"
  modified_base 21: /mod_base = "5'-thio thymidine"
  modified_base 2, 3, 4, 5, 6, 8, 9, 11, 12, 13, 15, 16, 17, 18, 19: /mod_base = "2'-hydroxy corresponding base"
cagagccauuagucagaugtt

SEQ ID NO: 1075 - DNA, 21 bp, artificial sequence
  siRNA reactive to human Eg5
  5'-terminal nucleic acid is a nucleoside, i.e. base + sugar but lacking 5'-phosphate
  modified_base 2, 5, 6, 7, 8, 10, 12: /mod_base = "2'-O-methyl corresponding base"
  modified_base 21: /mod_base = "5'-thio thymidine"
  modified_base 1, 3, 4, 9, 11, 13, 14, 15, 16, 17, 18, 19: /mod_base = "2'-hydroxy corresponding base"
gugauccuguacgaaaagatt

SEQ ID NO: 1076 - DNA, 21 bp, artificial sequence
  siRNA reactive to human Eg5
  5'-terminal nucleic acid is a nucleoside, i.e. base + sugar but lacking 5'-phosphate
  modified_base 9, 11, 17: /mod_base = "2'-O-methyl corresponding base"
  modified_base 21: /mod_base = "5'-thio thymidine"
  modified_base 1, 2, 3, 4, 5, 6, 7, 8, 10, 12, 13, 14, 15, 16, 18, 19: /mod_base = "2'-hydroxy corresponding base"
ucuuuucguacaggaucactt

SEQ ID NO: 1077 - DNA, 21 bp, artificial sequence
  siRNA reactive to human Eg5
  5'-terminal nucleic acid is a nucleoside, i.e. base + sugar but lacking 5'-phosphate
  modified_base 3, 4, 5, 6, 7, 9, 10, 17, 19: /mod_base = "2'-O-methyl corresponding base"
  modified_base 21: /mod_base = "5'-thio thymidine"
  modified_base 1, 2, 8, 11, 12, 13, 14, 15, 16, 18: /mod_base = "2'-hydroxy corresponding base"
agcucuuauuaaggaguautt

SEQ ID NO: 1078 - DNA, 21 bp, artificial sequence
  siRNA reactive to human Eg5
  5'-terminal nucleic acid is a nucleoside, i.e. base + sugar but lacking 5'-phosphate
  modified_base 2, 9, 12: /mod_base = "2'-O-methyl corresponding base"
  modified_base 21: /mod_base = "5'-thio thymidine"
  modified_base 1, 3, 4, 5, 6, 7, 8, 10, 11, 13, 14, 15, 16, 17, 18, 19: /mod_base = "2'-hydroxy corresponding base"
auacuccuuaauaagagcutt

SEQ ID NO: 1079 - DNA, 21 bp, artificial sequence
  siRNA reactive to human Eg5
  5'-terminal nucleic acid is a nucleoside, i.e. base + sugar but lacking 5'-phosphate
  modified_base 2, 3, 4, 5, 6, 8, 9, 16, 18: /mod_base = "2'-O-methyl corresponding base"
  modified_base 21: /mod_base = "5'-thio thymidine"
  modified_base 1, 7, 10, 11, 12, 13, 14, 15, 17, 19: /mod_base = "2'-hydroxy corresponding base"
gcucuuauuaaggaguauatt

SEQ ID NO: 1080 - DNA, 21 bp, artificial sequence
  siRNA reactive to human Eg5
  5'-terminal nucleic acid is a nucleoside, i.e. base + sugar but lacking 5'-phosphate
  modified_base 1, 3, 10, 13: /mod_base = "2'-O-methyl corresponding base"
  modified_base 21: /mod_base = "5'-thio thymidine"
  modified_base 2, 4, 5, 6, 7, 8, 9, 11, 12, 14, 15, 16, 17, 18, 19: /mod_base = "2'-hydroxy corresponding base"
uauacuccuuaauaagagctt

SEQ ID NO: 1081 - DNA, 21 bp, artificial sequence
  siRNA reactive to human Eg5
  5'-terminal nucleic acid is a nucleoside, i.e. base + sugar but lacking 5'-phosphate
  modified_base 1, 2, 3, 4, 6, 7, 14, 16, 18: /mod_base = "2'-O-methyl corresponding base"
  modified_base 21: /mod_base = "5'-thio thymidine"
  modified_base 5, 8, 9, 10, 11, 12, 13, 15, 17, 19: /mod_base = "2'-hydroxy corresponding base"
ucuuauuaaggaguauacgtt

SEQ ID NO: 1082 - DNA, 21 bp, artificial sequence
  siRNA reactive to human Eg5
  5'-terminal nucleic acid is a nucleoside, i.e. base + sugar but lacking 5'-phosphate
  modified_base 3, 5, 12, 15: /mod_base = "2'-O-methyl corresponding base"
  modified_base 21: /mod_base = "5'-thio thymidine"
  modified_base 1, 2, 4, 6, 7, 8, 9, 10, 11, 13, 14, 16, 17, 18, 19: /mod_base = "2'-hydroxy corresponding base"
cguauacuccuuaauaagatt

SEQ ID NO: 1083 - DNA, 21 bp, artificial sequence
  siRNA reactive to human Eg5
  5'-terminal nucleic acid is a nucleoside, i.e. base + sugar but lacking 5'-phosphate
  modified_base 1, 3, 4, 11, 13, 15: /mod_base = "2'-O-methyl corresponding base"
  modified_base 21: /mod_base = "5'-thio thymidine"
  modified_base 2, 5, 6, 7, 8, 9, 10, 12, 14, 16, 17, 18, 19: /mod_base = "2'-hydroxy corresponding base"
uauuaaggaguauacggagtt

SEQ ID NO: 1084 - DNA, 21 bp, artificial sequence
  siRNA reactive to human Eg5
  5'-terminal nucleic acid is a nucleoside, i.e. base + sugar but lacking 5'-phosphate
  modified_base 6, 8, 15, 18: /mod_base = "2'-O-methyl corresponding base"
  modified_base 21: /mod_base = "5'-thio thymidine"
  modified_base 1, 2, 3, 4, 5, 7, 9, 10, 11, 12, 13, 14, 16, 17, 19: /mod_base = "2'-hydroxy corresponding base"
cuccguauacuccuuaauatt

SEQ ID NO: 1085 - DNA, 21 bp, artificial sequence
  siRNA reactive to human Eg5
  5'-terminal nucleic acid is a nucleoside, i.e. base + sugar but lacking 5'-phosphate
  modified_base 1, 2, 4, 7, 8, 9, 11: /mod_base = "2'-O-methyl corresponding base"
  modified_base 21: /mod_base = "5'-thio thymidine"
  modified_base 3, 5, 6, 10, 12, 13, 14, 15, 16, 17, 18, 19: /mod_base = "2'-hydroxy corresponding base"
cugcagcccgugagaaaaatt

SEQ ID NO: 1086 - DNA, 21 bp, artificial sequence
  siRNA reactive to human Eg5
  5'-terminal nucleic acid is a nucleoside, i.e. base + sugar but lacking 5'-phosphate
  modified_base 8, 17: /mod_base = "2'-O-methyl corresponding base"
  modified_base 21: /mod_base = "5'-thio thymidine"
  modified_base 1, 2, 3, 4, 5, 6, 7, 9, 10, 11, 12, 13, 14, 15, 16, 18, 19: /mod_base = "2'-hydroxy corresponding base"
uuuuucucacgggcugcagtt

SEQ ID NO: 1087 - DNA, 21 bp, artificial sequence
  siRNA reactive to human Eg5
  5'-terminal nucleic acid is a nucleoside, i.e. base + sugar but lacking 5'-phosphate
  modified_base 1, 2, 7, 8, 11, 12, 13, 14, 15, 16: /mod_base = "2'-O-methyl corresponding base"
  modified_base 21: /mod_base = "5'-thio thymidine"
  modified_base 3, 4, 5, 6, 9, 10, 17, 18, 19: /mod_base = "2'-hydroxy corresponding base"
ucaagacugaucuucuaagtt

SEQ ID NO: 1088 - DNA, 21 bp, artificial sequence
  siRNA reactive to human Eg5
  5'-terminal nucleic acid is a nucleoside, i.e. base + sugar but lacking 5'-phosphate
  modified_base 3, 11: /mod_base = "2'-O-methyl corresponding base"
  modified_base 21: /mod_base = "5'-thio thymidine"
  modified_base 1, 2, 4, 5, 6, 7, 8, 9, 10, 12, 13, 14, 15, 16, 17, 18, 19: /mod_base = "2'-hydroxy corresponding base"
cuuagaagaucagucuugatt

SEQ ID NO: 1089 - DNA, 21 bp, artificial sequence
  siRNA reactive to human Eg5
  5'-terminal nucleic acid is a nucleoside, i.e. base + sugar but lacking 5'-phosphate
  modified_base 1, 2, 3, 4, 5, 9, 10, 11, 13, 14: /mod_base = "2'-O-methyl corresponding base"
  modified_base 21: /mod_base = "5'-thio thymidine"
  modified_base 6, 7, 8, 12, 15, 16, 17, 18, 19: /mod_base = "2'-hydroxy corresponding base"
cuucuaaguucacuggaaatt

SEQ ID NO: 1090 - DNA, 21 bp, artificial sequence
  siRNA reactive to human Eg5
  5'-terminal nucleic acid is a nucleoside, i.e. base + sugar but lacking 5'-phosphate
  modified_base 5, 14: /mod_base = "2'-O-methyl corresponding base"
  modified_base 21: /mod_base = "5'-thio thymidine"
  modified_base 1, 2, 3, 4, 6, 7, 8, 9, 10, 11, 12, 13, 15, 16, 17, 18, 19: /mod_base = "2'-hydroxy corresponding base"
uuuccagugaacuuagaagtt

SEQ ID NO: 1091 - DNA, 21 bp, artificial sequence
  siRNA reactive to human Eg5
  5'-terminal nucleic acid is a nucleoside, i.e. base + sugar but lacking 5'-phosphate
  modified_base 1, 3, 7, 8, 11, 15, 16, 17, 18, 19: /mod_base = "2'-O-methyl corresponding base"
  modified_base 21: /mod_base = "5'-thio thymidine"
  modified_base 2, 4, 5, 6, 9, 10, 12, 13, 14: /mod_base = "2'-hydroxy corresponding base"
ugcaaguuaaugaaucuuutt

SEQ ID NO: 1092 - DNA, 21 bp, artificial sequence
  siRNA reactive to human Eg5
  5'-terminal nucleic acid is a nucleoside, i.e. base + sugar but lacking 5'-phosphate
  modified_base 8, 11, 18: /mod_base = "2'-O-methyl corresponding base"
  modified_base 21: /mod_base = "5'-thio thymidine"
  modified_base 1, 2, 3, 4, 5, 6, 7, 9, 10, 12, 13, 14, 15, 16, 17, 19: /mod_base = "2'-hydroxy corresponding base"
aaagauucauuaacuugcatt

SEQ ID NO: 1093 - DNA, 21 bp, artificial sequence
  siRNA reactive to human Eg5
  5'-terminal nucleic acid is a nucleoside, i.e. base + sugar but lacking 5'-phosphate
  modified_base 3, 4, 5, 11, 13, 16, 17: /mod_base = "2'-O-methyl corresponding base"
  modified_base 21: /mod_base = "5'-thio thymidine"
  modified_base 1, 2, 6, 7, 8, 9, 10, 12, 14, 15, 18, 19: /mod_base = "2'-hydroxy corresponding base"
aaucuaaggauauagucaatt

SEQ ID NO: 1094 - DNA, 21 bp, artificial sequence
  siRNA reactive to human Eg5
  5'-terminal nucleic acid is a nucleoside, i.e. base + sugar but lacking 5'-phosphate
  modified_base 6, 8, 14: /mod_base = "2'-O-methyl corresponding base"
  modified_base 21: /mod_base = "5'-thio thymidine"
  modified_base 1, 2, 3, 4, 5, 7, 9, 10, 11, 12, 13, 15, 16, 17, 18, 19: /mod_base = "2'-hydroxy corresponding base"
uugacuauauccuuagauutt

SEQ ID NO: 1095 - DNA, 21 bp, artificial sequence
  siRNA reactive to human Eg5
  5'-terminal nucleic acid is a nucleoside, i.e. base + sugar but lacking 5'-phosphate
  modified_base 2, 3, 4, 5, 6, 10, 12, 18: /mod_base = "2'-O-methyl corresponding base"
  modified_base 21: /mod_base = "5'-thio thymidine"
  modified_base 1, 7, 8, 9, 11, 13, 14, 15, 16, 17, 19: /mod_base = "2'-hydroxy corresponding base"
aucucugaacacaagaacatt

SEQ ID NO: 1096 - DNA, 21 bp, artificial sequence
  siRNA reactive to human Eg5
  5'-terminal nucleic acid is a nucleoside, i.e. base + sugar but lacking 5'-phosphate
  modified_base 13: /mod_base = "2'-O-methyl corresponding base"
  modified_base 21: /mod_base = "5'-thio thymidine"
  modified_base 1, 2, 3, 4, 5, 6, 7, 8, 9, 10, 11, 12, 14, 15, 16, 17, 18, 19: /mod_base = "2'-hydroxy corresponding base"
uguucuuguguucagagautt

SEQ ID NO: 1097 - DNA, 21 bp, artificial sequence
  siRNA reactive to human Eg5
  5'-terminal nucleic acid is a nucleoside, i.e. base + sugar but lacking 5'-phosphate
  modified_base 1, 2, 3, 4, 8, 11, 15, 17, 18, 19: /mod_base = "2'-O-methyl corresponding base"
  modified_base 21: /mod_base = "5'-thio thymidine"
  modified_base 5, 6, 7, 9, 10, 12, 13, 14, 16: /mod_base = "2'-hydroxy corresponding base"
uucugaacaguggguaucutt

SEQ ID NO: 1098 - DNA, 21 bp, artificial sequence
  siRNA reactive to human Eg5
  5'-terminal nucleic acid is a nucleoside, i.e. base + sugar but lacking 5'-phosphate
  modified_base 4, 8, 15: /mod_base = "2'-O-methyl corresponding base"
  modified_base 21: /mod_base = "5'-thio thymidine"
  modified_base 1, 2, 3, 5, 6, 7, 9, 10, 11, 12, 13, 14, 16, 17, 18, 19: /mod_base = "2'-hydroxy corresponding base"
agauacccacuguucagaatt

SEQ ID NO: 1099 - DNA, 21 bp, artificial sequence
  siRNA reactive to human Eg5
  5'-terminal nucleic acid is a nucleoside, i.e. base + sugar but lacking 5'-phosphate
  modified_base 3, 4, 6, 7, 8, 10, 12, 13, 14, 16, 17: /mod_base = "2'-O-methyl corresponding base"
  modified_base 21: /mod_base = "5'-thio thymidine"
  modified_base 1, 2, 5, 9, 11, 15, 18, 19: /mod_base = "2'-hydroxy corresponding base"
aguuauuuauacccaucaatt

SEQ ID NO: 1100 - DNA, 21 bp, artificial sequence
  siRNA reactive to human Eg5
  5'-terminal nucleic acid is a nucleoside, i.e. base + sugar but lacking 5'-phosphate
  modified_base 9, 11, 15: /mod_base = "2'-O-methyl corresponding base"
  modified_base 21: /mod_base = "5'-thio thymidine"
  modified_base 1, 2, 3, 4, 5, 6, 7, 8, 10, 12, 13, 14, 16, 17, 18, 19: /mod_base = "2'-hydroxy corresponding base"
uugauggguauaaauaacutt

SEQ ID NO: 1101 - DNA, 21 bp, artificial sequence
  siRNA reactive to human Eg5
  5'-terminal nucleic acid is a nucleoside, i.e. base + sugar but lacking 5'-phosphate
  modified_base 2, 4, 5, 9, 10, 12, 13, 14: /mod_base = "2'-O-methyl corresponding base"
  modified_base 21: /mod_base = "5'-thio thymidine"
  modified_base 1, 3, 6, 7, 8, 11, 15, 16, 17, 18, 19: /mod_base = "2'-hydroxy corresponding base"
augcuaaacuguucagaaatt

SEQ ID NO: 1102 - DNA, 21 bp, artificial sequence
  siRNA reactive to human Eg5
  5'-terminal nucleic acid is a nucleoside, i.e. base + sugar but lacking 5'-phosphate
  modified_base 9, 14, 17: /mod_base = "2'-O-methyl corresponding base"
  modified_base 21: /mod_base = "5'-thio thymidine"
  modified_base 1, 2, 3, 4, 5, 6, 7, 8, 10, 11, 12, 13, 15, 16, 18, 19: /mod_base = "2'-hydroxy corresponding base"
uuucugaacaguuuagcautt

SEQ ID NO: 1103 - DNA, 21 bp, artificial sequence
  siRNA reactive to human Eg5
  5'-terminal nucleic acid is a nucleoside, i.e. base + sugar but lacking 5'-phosphate
  modified_base 1, 2, 4, 9, 11, 12, 13, 16, 17, 19: /mod_base = "2'-O-methyl corresponding base"
  modified_base 21: /mod_base = "5'-thio thymidine"
  modified_base 3, 5, 6, 7, 8, 10, 14, 15, 18: /mod_base = "2'-hydroxy corresponding base"
cuacagagcacuugguuactt

SEQ ID NO: 1104 - DNA, 21 bp, artificial sequence
  siRNA reactive to human Eg5
  5'-terminal nucleic acid is a nucleoside, i.e. base + sugar but lacking 5'-phosphate
  modified_base 2, 6, 17: /mod_base = "2'-O-methyl corresponding base"
  modified_base 21: /mod_base = "5'-thio thymidine"
  modified_base 1, 3, 4, 5, 7, 8, 9, 10, 11, 12, 13, 14, 15, 16, 18, 19: /mod_base = "2'-hydroxy corresponding base"
guaaccaagugcucuguagtt

SEQ ID NO: 1105 - DNA, 21 bp, artificial sequence
  siRNA reactive to human Eg5
  5'-terminal nucleic acid is a nucleoside, i.e. base + sugar but lacking 5'-phosphate
  modified_base 1, 3, 5, 7, 8, 11, 12, 16, 18: /mod_base = "2'-O-methyl corresponding base"
  modified_base 21: /mod_base = "5'-thio thymidine"
  modified_base 2, 4, 6, 9, 10, 13, 14, 15, 17, 19: /mod_base = "2'-hydroxy corresponding base"
uauauaucagccgggcgcgtt

SEQ ID NO: 1106 - DNA, 21 bp, artificial sequence
  siRNA reactive to human Eg5
  5'-terminal nucleic acid is a nucleoside, i.e. base + sugar but lacking 5'-phosphate
  modified_base 14, 16, 18: /mod_base = "2'-O-methyl corresponding base"
  modified_base 21: /mod_base = "5'-thio thymidine"
  modified_base 1, 2, 3, 4, 5, 6, 7, 8, 9, 10, 11, 12, 13, 15, 17, 19: /mod_base = "2'-hydroxy corresponding base"
cgcgcccggcugauauauatt

SEQ ID NO: 1107 - DNA, 21 bp, artificial sequence
  siRNA reactive to human Eg5
  5'-terminal nucleic acid is a nucleoside, i.e. base + sugar but lacking 5'-phosphate
  modified_base 2, 4, 8, 10, 12, 14, 15, 16, 17, 18: /mod_base = "2'-O-methyl corresponding base"
  modified_base 21: /mod_base = "5'-thio thymidine"
  modified_base 1, 3, 5, 6, 7, 9, 11, 13, 19: /mod_base = "2'-hydroxy corresponding base"
auguaaauacguauuucuatt

SEQ ID NO: 1108 - DNA, 21 bp, artificial sequence
  siRNA reactive to human Eg5
  5'-terminal nucleic acid is a nucleoside, i.e. base + sugar but lacking 5'-phosphate
  modified_base 1, 7, 11, 15, 17: /mod_base = "2'-O-methyl corresponding base"
  modified_base 21: /mod_base = "5'-thio thymidine"
  modified_base 2, 3, 4, 5, 6, 8, 9, 10, 12, 13, 14, 16, 18, 19: /mod_base = "2'-hydroxy corresponding base"
uagaaauacguauuuacautt

SEQ ID NO: 1109 - DNA, 21 bp, artificial sequence
  siRNA reactive to human Eg5
  5'-terminal nucleic acid is a nucleoside, i.e. base + sugar but lacking 5'-phosphate
  modified_base 1, 2, 3, 4, 5, 6, 7, 8, 11, 12, 13, 17, 18, 19: /mod_base = "2'-O-methyl corresponding base"
  modified_base 21: /mod_base = "5'-thio thymidine"
  modified_base 9, 10, 14, 15, 16: /mod_base = "2'-hydroxy corresponding base"
uuuuucucgauucaaaucutt

SEQ ID NO: 1110 - DNA, 21 bp, artificial sequence
  siRNA reactive to human Eg5
  5'-terminal nucleic acid is a nucleoside, i.e. base + sugar but lacking 5'-phosphate
  modified_base 6: /mod_base = "2'-O-methyl corresponding base"
  modified_base 21: /mod_base = "5'-thio thymidine"
  modified_base 1, 2, 3, 4, 5, 7, 8, 9, 10, 11, 12, 13, 14, 15, 16, 17, 18, 19: /mod_base = "2'-hydroxy corresponding base"
agauuugaaucgagaaaaatt

SEQ ID NO: 1111 - DNA, 21 bp, artificial sequence
  siRNA reactive to human Eg5
  5'-terminal nucleic acid is a nucleoside, i.e. base + sugar but lacking 5'-phosphate
  modified_base 3, 4, 5, 6, 9, 10, 11, 12, 13, 18, 19: /mod_base = "2'-O-methyl corresponding base"
  modified_base 21: /mod_base = "5'-thio thymidine"
  modified_base 1, 2, 7, 8, 14, 15, 16, 17: /mod_base = "2'-hydroxy corresponding base"
aaucuuaacccuuaggacutt

SEQ ID NO: 1112 - DNA, 21 bp, artificial sequence
  siRNA reactive to human Eg5
  5'-terminal nucleic acid is a nucleoside, i.e. base + sugar but lacking 5'-phosphate
  modified_base 6, 13: /mod_base = "2'-O-methyl corresponding base"
  modified_base 21: /mod_base = "5'-thio thymidine"
  modified_base 1, 2, 3, 4, 5, 7, 8, 9, 10, 11, 12, 14, 15, 16, 17, 18, 19: /mod_base = "2'-hydroxy corresponding base"
aguccuaaggguuaagauutt

SEQ ID NO: 1113 - DNA, 21 bp, artificial sequence
  siRNA reactive to human Eg5
  5'-terminal nucleic acid is a nucleoside, i.e. base + sugar but lacking 5'-phosphate
  modified_base 1, 2, 3, 4, 9, 10, 11, 12, 15, 17, 18, 19: /mod_base = "2'-O-methyl corresponding base"
  modified_base 21: /mod_base = "5'-thio thymidine"
  modified_base 5, 6, 7, 8, 13, 14, 16: /mod_base = "2'-hydroxy corresponding base"
ccuuaggacucugguauuutt

SEQ ID NO: 1114 - DNA, 21 bp, artificial sequence
  siRNA reactive to human Eg5
  5'-terminal nucleic acid is a nucleoside, i.e. base + sugar but lacking 5'-phosphate
  modified_base 4, 7, 15: /mod_base = "2'-O-methyl corresponding base"
  modified_base 21: /mod_base = "5'-thio thymidine"
  modified_base 1, 2, 3, 5, 6, 8, 9, 10, 11, 12, 13, 14, 16, 17, 18, 19: /mod_base = "2'-hydroxy corresponding base"
aaauaccagaguccuaaggtt

SEQ ID NO: 1115 - DNA, 21 bp, artificial sequence
  siRNA reactive to human Eg5
  5'-terminal nucleic acid is a nucleoside, i.e. base + sugar but lacking 5'-phosphate
  modified_base 3, 7, 8, 10, 11, 12, 13, 14, 17: /mod_base = "2'-O-methyl corresponding base"
  modified_base 21: /mod_base = "5'-thio thymidine"
  modified_base 1, 2, 4, 5, 6, 9, 15, 16, 18, 19: /mod_base = "2'-hydroxy corresponding base"
aauaaacugcccucaguaatt

SEQ ID NO: 1116 - DNA, 21 bp, artificial sequence
  siRNA reactive to human Eg5
  5'-terminal nucleic acid is a nucleoside, i.e. base + sugar but lacking 5'-phosphate
  modified_base 2, 11, 16: /mod_base = "2'-O-methyl corresponding base"
  modified_base 21: /mod_base = "5'-thio thymidine"
  modified_base 1, 3, 4, 5, 6, 7, 8, 9, 10, 12, 13, 14, 15, 17, 18, 19: /mod_base = "2'-hydroxy corresponding base"
uuacugagggcaguuuauutt

SEQ ID NO: 1117 - DNA, 21 bp, artificial sequence
  siRNA reactive to human Eg5
  5'-terminal nucleic acid is a nucleoside, i.e. base + sugar but lacking 5'-phosphate
  modified_base 3, 4, 5, 6, 8, 10: /mod_base = "2'-O-methyl corresponding base"
  modified_base 21: /mod_base = "5'-thio thymidine"
  modified_base 1, 2, 7, 9, 11, 12, 13, 14, 15, 16, 17, 18, 19: /mod_base = "2'-hydroxy corresponding base"
gauccuguacgaaaagaagtt

SEQ ID NO: 1118 - DNA, 21 bp, artificial sequence
  siRNA reactive to human Eg5
  5'-terminal nucleic acid is a nucleoside, i.e. base + sugar but lacking 5'-phosphate
  modified_base 11, 13: /mod_base = "2'-O-methyl corresponding base"
  modified_base 21: /mod_base = "5'-thio thymidine"
  modified_base 1, 2, 3, 4, 5, 6, 7, 8, 9, 10, 12, 14, 15, 16, 17, 18, 19: /mod_base = "2'-hydroxy corresponding base"
cuucuuuucguacaggauctt

SEQ ID NO: 1119 - DNA, 21 bp, artificial sequence
  siRNA reactive to human Eg5
  5'-terminal nucleic acid is a nucleoside, i.e. base + sugar but lacking 5'-phosphate
  modified_base 3, 5, 8, 9, 10, 11, 13, 15: /mod_base = "2'-O-methyl corresponding base"
  modified_base 21: /mod_base = "5'-thio thymidine"
  modified_base 1, 2, 4, 6, 7, 12, 14, 16, 17, 18, 19: /mod_base = "2'-hydroxy corresponding base"
aaugugauccuguacgaaatt

SEQ ID NO: 1120 - DNA, 21 bp, artificial sequence
  siRNA reactive to human Eg5
  5'-terminal nucleic acid is a nucleoside, i.e. base + sugar but lacking 5'-phosphate
  modified_base 6, 8, 14, 16: /mod_base = "2'-O-methyl corresponding base"
  modified_base 21: /mod_base = "5'-thio thymidine"
  modified_base 1, 2, 3, 4, 5, 7, 9, 10, 11, 12, 13, 15, 17, 18, 19: /mod_base = "2'-hydroxy corresponding base"
uuucguacaggaucacauutt

SEQ ID NO: 1121 - DNA, 21 bp, artificial sequence
  siRNA reactive to human Eg5
  5'-terminal nucleic acid is a nucleoside, i.e. base + sugar but lacking 5'-phosphate
  modified_base 2, 8, 10, 11, 14, 15, 17, 18, 19: /mod_base = "2'-O-methyl corresponding base"
  modified_base 21: /mod_base = "5'-thio thymidine"
  modified_base 1, 3, 4, 5, 6, 7, 9, 12, 13, 16: /mod_base = "2'-hydroxy corresponding base"
gugaaaacauuggccguuctt

SEQ ID NO: 1122 - DNA, 21 bp, artificial sequence
  siRNA reactive to human Eg5
  5'-terminal nucleic acid is a nucleoside, i.e. base + sugar but lacking 5'-phosphate
  modified_base 8, 17: /mod_base = "2'-O-methyl corresponding base"
  modified_base 21: /mod_base = "5'-thio thymidine"
  modified_base 1, 2, 3, 4, 5, 6, 7, 9, 10, 11, 12, 13, 14, 15, 16, 18, 19: /mod_base = "2'-hydroxy corresponding base"
gaacggccaauguuuucactt

SEQ ID NO: 1123 - DNA, 21 bp, artificial sequence
  siRNA reactive to human Eg5
  5'-terminal nucleic acid is a nucleoside, i.e. base + sugar but lacking 5'-phosphate
  modified_base 1, 2, 3, 11, 12, 13, 14, 18: /mod_base = "2'-O-methyl corresponding base"
  modified_base 21: /mod_base = "5'-thio thymidine"
  modified_base 4, 5, 6, 7, 8, 9, 10, 15, 16, 17, 19: /mod_base = "2'-hydroxy corresponding base"
cuugaggaaacucugaguatt

SEQ ID NO: 1124 - DNA, 21 bp, artificial sequence
  siRNA reactive to human Eg5
  5'-terminal nucleic acid is a nucleoside, i.e. base + sugar but lacking 5'-phosphate
  modified_base 1, 5, 16: /mod_base = "2'-O-methyl corresponding base"
  modified_base 21: /mod_base = "5'-thio thymidine"
  modified_base 2, 3, 4, 6, 7, 8, 9, 10, 11, 12, 13, 14, 15, 17, 18, 19: /mod_base = "2'-hydroxy corresponding base"
uacucagaguuuccucaagtt

SEQ ID NO: 1125 - DNA, 21 bp, artificial sequence
  siRNA reactive to human Eg5
  5'-terminal nucleic acid is a nucleoside, i.e. base + sugar but lacking 5'-phosphate
  modified_base 1, 3, 4, 5, 10, 15, 16, 17, 18: /mod_base = "2'-O-methyl corresponding base"
  modified_base 21: /mod_base = "5'-thio thymidine"
  modified_base 2, 6, 7, 8, 9, 11, 12, 13, 14, 19: /mod_base = "2'-hydroxy corresponding base"
cguuuaaaacgagaucuugtt

SEQ ID NO: 1126 - DNA, 21 bp, artificial sequence
  siRNA reactive to human Eg5
  5'-terminal nucleic acid is a nucleoside, i.e. base + sugar but lacking 5'-phosphate
  modified_base 1, 14: /mod_base = "2'-O-methyl corresponding base"
  modified_base 21: /mod_base = "5'-thio thymidine"
  modified_base 2, 3, 4, 5, 6, 7, 8, 9, 10, 11, 12, 13, 15, 16, 17, 18, 19: /mod_base = "2'-hydroxy corresponding base"
caagaucucguuuuaaacgtt

SEQ ID NO: 1127 - DNA, 21 bp, artificial sequence
  siRNA reactive to human Eg5
  5'-terminal nucleic acid is a nucleoside, i.e. base + sugar but lacking 5'-phosphate
  modified_base 1, 2, 7, 12, 13, 14, 15, 17, 18: /mod_base = "2'-O-methyl corresponding base"
  modified_base 21: /mod_base = "5'-thio thymidine"
  modified_base 3, 4, 5, 6, 8, 9, 10, 11, 16, 19: /mod_base = "2'-hydroxy corresponding base"
uuaaaacgagaucuugcugtt

SEQ ID NO: 1128 - DNA, 21 bp, artificial sequence
  siRNA reactive to human Eg5
  5'-terminal nucleic acid is a nucleoside, i.e. base + sugar but lacking 5'-phosphate
  modified_base 1, 4, 17: /mod_base = "2'-O-methyl corresponding base"
  modified_base 21: /mod_base = "5'-thio thymidine"
  modified_base 2, 3, 5, 6, 7, 8, 9, 10, 11, 12, 13, 14, 15, 16, 18, 19: /mod_base = "2'-hydroxy corresponding base"
cagcaagaucucguuuuaatt

SEQ ID NO: 1129 - DNA, 21 bp, artificial sequence
  siRNA reactive to human Eg5
  5'-terminal nucleic acid is a nucleoside, i.e. base + sugar but lacking 5'-phosphate
  modified_base 6, 8, 10, 11, 12, 15, 16, 17, 18, 19: /mod_base = "2'-O-methyl corresponding base"
  modified_base 21: /mod_base = "5'-thio thymidine"
  modified_base 1, 2, 3, 4, 5, 7, 9, 13, 14: /mod_base = "2'-hydroxy corresponding base"
aaagauguaucuggucucctt

SEQ ID NO: 1130 - DNA, 21 bp, artificial sequence
  siRNA reactive to human Eg5
  5'-terminal nucleic acid is a nucleoside, i.e. base + sugar but lacking 5'-phosphate
  modified_base 7, 11, 13: /mod_base = "2'-O-methyl corresponding base"
  modified_base 21: /mod_base = "5'-thio thymidine"
  modified_base 1, 2, 3, 4, 5, 6, 8, 9, 10, 12, 14, 15, 16, 17, 18, 19: /mod_base = "2'-hydroxy corresponding base"
ggagaccagauacaucuuutt

SEQ ID NO: 1131 - DNA, 21 bp, artificial sequence
  siRNA reactive to human Eg5
  5'-terminal nucleic acid is a nucleoside, i.e. base + sugar but lacking 5'-phosphate
  modified_base 1, 8, 10, 12, 13, 14, 16, 17, 18: /mod_base = "2'-O-methyl corresponding base"
  modified_base 21: /mod_base = "5'-thio thymidine"
  modified_base 2, 3, 4, 5, 6, 7, 9, 11, 15, 19: /mod_base = "2'-hydroxy corresponding base"
cagaaaaugugucuacucatt

SEQ ID NO: 1132 - DNA, 21 bp, artificial sequence
  siRNA reactive to human Eg5
  5'-terminal nucleic acid is a nucleoside, i.e. base + sugar but lacking 5'-phosphate
  modified_base 5, 9, 11: /mod_base = "2'-O-methyl corresponding base"
  modified_base 21: /mod_base = "5'-thio thymidine"
  modified_base 1, 2, 3, 4, 6, 7, 8, 10, 12, 13, 14, 15, 16, 17, 18, 19: /mod_base = "2'-hydroxy corresponding base"
ugaguagacacauuuucugtt

SEQ ID NO: 1133 - DNA, 21 bp, artificial sequence
  siRNA reactive to human Eg5
  5'-terminal nucleic acid is a nucleoside, i.e. base + sugar but lacking 5'-phosphate
  modified_base 1, 7, 8, 11, 12, 15, 17, 19: /mod_base = "2'-O-methyl corresponding base"
  modified_base 21: /mod_base = "5'-thio thymidine"
  modified_base 2, 3, 4, 5, 6, 9, 10, 13, 14, 16, 18: /mod_base = "2'-hydroxy corresponding base"
caggaauugauuaauguactt

SEQ ID NO: 1134 - DNA, 21 bp, artificial sequence
  siRNA reactive to human Eg5
  5'-terminal nucleic acid is a nucleoside, i.e. base + sugar but lacking 5'-phosphate
  modified_base 2, 4, 7, 11: /mod_base = "2'-O-methyl corresponding base"
  modified_base 21: /mod_base = "5'-thio thymidine"
  modified_base 1, 3, 5, 6, 8, 9, 10, 12, 13, 14, 15, 16, 17, 18, 19: /mod_base = "2'-hydroxy corresponding base"
guacauuaaucaauuccugtt

SEQ ID NO: 1135 - DNA, 21 bp, artificial sequence
  siRNA reactive to human Eg5
  5'-terminal nucleic acid is a nucleoside, i.e. base + sugar but lacking 5'-phosphate
  modified_base 3, 4, 7, 8, 13, 15, 17, 18, 19: /mod_base = "2'-O-methyl corresponding base"
  modified_base 21: /mod_base = "5'-thio thymidine"
  modified_base 1, 2, 5, 6, 9, 10, 11, 12, 14, 16: /mod_base = "2'-hydroxy corresponding base"
agucaacuaaagcauauuutt

SEQ ID NO: 1136 - DNA, 21 bp, artificial sequence
  siRNA reactive to human Eg5
  5'-terminal nucleic acid is a nucleoside, i.e. base + sugar but lacking 5'-phosphate
  modified_base 4, 11: /mod_base = "2'-O-methyl corresponding base"
  modified_base 21: /mod_base = "5'-thio thymidine"
  modified_base 1, 2, 3, 5, 6, 7, 8, 9, 10, 12, 13, 14, 15, 16, 17, 18, 19: /mod_base = "2'-hydroxy corresponding base"
aaauaugcuuuaguugacutt

SEQ ID NO: 1137 - DNA, 21 bp, artificial sequence
  siRNA reactive to human Eg5
  5'-terminal nucleic acid is a nucleoside, i.e. base + sugar but lacking 5'-phosphate
  modified_base 1, 3, 5, 8, 11, 12, 13, 15, 17: /mod_base = "2'-O-methyl corresponding base"
  modified_base 21: /mod_base = "5'-thio thymidine"
  modified_base 2, 4, 6, 7, 9, 10, 14, 16, 18, 19: /mod_base = "2'-hydroxy corresponding base"
uguguaacaaucuacaugatt

SEQ ID NO: 1138 - DNA, 21 bp, artificial sequence
  siRNA reactive to human Eg5
  5'-terminal nucleic acid is a nucleoside, i.e. base + sugar but lacking 5'-phosphate
  modified_base 2, 6, 14, 16, 18: /mod_base = "2'-O-methyl corresponding base"
  modified_base 21: /mod_base = "5'-thio thymidine"
  modified_base 1, 3, 4, 5, 7, 8, 9, 10, 11, 12, 13, 15, 17, 19: /mod_base = "2'-hydroxy corresponding base"
ucauguagauuguuacacatt

SEQ ID NO: 1139 - DNA, 21 bp, artificial sequence
  siRNA reactive to human Eg5
  5'-terminal nucleic acid is a nucleoside, i.e. base + sugar but lacking 5'-phosphate
  modified_base 2, 4, 5, 7, 8, 9, 11, 12, 13, 14, 15, 16, 19: /mod_base = "2'-O-methyl corresponding base"
  modified_base 21: /mod_base = "5'-thio thymidine"
  modified_base 1, 3, 6, 10, 17, 18: /mod_base = "2'-hydroxy corresponding base"
auaccauuuguuccuuggutt

SEQ ID NO: 1140 - DNA, 21 bp, artificial sequence
  siRNA reactive to human Eg5
  5'-terminal nucleic acid is a nucleoside, i.e. base + sugar but lacking 5'-phosphate
  modified_base 3, 10, 17: /mod_base = "2'-O-methyl corresponding base"
  modified_base 21: /mod_base = "5'-thio thymidine"
  modified_base 1, 2, 4, 5, 6, 7, 8, 9, 11, 12, 13, 14, 15, 16, 18, 19: /mod_base = "2'-hydroxy corresponding base"
accaaggaacaaaugguautt

SEQ ID NO: 1141 - DNA, 21 bp, artificial sequence
  siRNA reactive to human Eg5
  5'-terminal nucleic acid is a nucleoside, i.e. base + sugar but lacking 5'-phosphate
  modified_base 2, 8, 9, 10, 16, 18: /mod_base = "2'-O-methyl corresponding base"
  modified_base 21: /mod_base = "5'-thio thymidine"
  modified_base 1, 3, 4, 5, 6, 7, 11, 12, 13, 14, 15, 17, 19: /mod_base = "2'-hydroxy corresponding base"
gcagaaaucuaaggauauatt

SEQ ID NO: 1142 - DNA, 21 bp, artificial sequence
  siRNA reactive to human Eg5
  5'-terminal nucleic acid is a nucleoside, i.e. base + sugar but lacking 5'-phosphate
  modified_base 1, 3, 9: /mod_base = "2'-O-methyl corresponding base"
  modified_base 21: /mod_base = "5'-thio thymidine"
  modified_base 2, 4, 5, 6, 7, 8, 10, 11, 12, 13, 14, 15, 16, 17, 18, 19: /mod_base = "2'-hydroxy corresponding base"
uauauccuuagauuucugctt

SEQ ID NO: 1143 - DNA, 21 bp, artificial sequence
  siRNA reactive to human Eg5
  5'-terminal nucleic acid is a nucleoside, i.e. base + sugar but lacking 5'-phosphate
  modified_base 1, 4, 5, 6, 7, 8, 9, 11, 17, 18, 19: /mod_base = "2'-O-methyl corresponding base"
  modified_base 21: /mod_base = "5'-thio thymidine"
  modified_base 2, 3, 10, 12, 13, 14, 15, 16: /mod_base = "2'-hydroxy corresponding base"
uggcuucucacaggaacuctt

SEQ ID NO: 1144 - DNA, 21 bp, artificial sequence
  siRNA reactive to human Eg5
  5'-terminal nucleic acid is a nucleoside, i.e. base + sugar but lacking 5'-phosphate
  modified_base 18: /mod_base = "2'-O-methyl corresponding base"
  modified_base 21: /mod_base = "5'-thio thymidine"
  modified_base 1, 2, 3, 4, 5, 6, 7, 8, 9, 10, 11, 12, 13, 14, 15, 16, 17, 19: /mod_base = "2'-hydroxy corresponding base"
gaguuccugugagaagccatt

SEQ ID NO: 1145 - DNA, 21 bp, artificial sequence
  siRNA reactive to human Eg5
  5'-terminal nucleic acid is a nucleoside, i.e. base + sugar but lacking 5'-phosphate
  modified_base 5, 7, 11, 12, 13, 14, 15, 19: /mod_base = "2'-O-methyl corresponding base"
  modified_base 21: /mod_base = "5'-thio thymidine"
  modified_base 1, 2, 3, 4, 6, 8, 9, 10, 16, 17, 18: /mod_base = "2'-hydroxy corresponding base"
gagaugugaaucucugaactt

SEQ ID NO: 1146 - DNA, 21 bp, artificial sequence
  siRNA reactive to human Eg5
  5'-terminal nucleic acid is a nucleoside, i.e. base + sugar but lacking 5'-phosphate
  modified_base 4, 12, 14: /mod_base = "2'-O-methyl corresponding base"
  modified_base 21: /mod_base = "5'-thio thymidine"
  modified_base 1, 2, 3, 5, 6, 7, 8, 9, 10, 11, 13, 15, 16, 17, 18, 19: /mod_base = "2'-hydroxy corresponding base"
guucagagauucacaucuctt

SEQ ID NO: 1147 - DNA, 21 bp, artificial sequence
  siRNA reactive to human Eg5
  5'-terminal nucleic acid is a nucleoside, i.e. base + sugar but lacking 5'-phosphate
  modified_base 1, 3, 7, 8, 11, 13, 14, 16: /mod_base = "2'-O-methyl corresponding base"
  modified_base 21: /mod_base = "5'-thio thymidine"
  modified_base 2, 4, 5, 6, 9, 10, 12, 15, 17, 18, 19: /mod_base = "2'-hydroxy corresponding base"
uguaagccaauguugugagtt

SEQ ID NO: 1148 - DNA, 21 bp, artificial sequence
  siRNA reactive to human Eg5
  5'-terminal nucleic acid is a nucleoside, i.e. base + sugar but lacking 5'-phosphate
  modified_base 3, 5, 8, 16, 18: /mod_base = "2'-O-methyl corresponding base"
  modified_base 21: /mod_base = "5'-thio thymidine"
  modified_base 1, 2, 4, 6, 7, 9, 10, 11, 12, 13, 14, 15, 17, 19: /mod_base = "2'-hydroxy corresponding base"
cucacaacauuggcuuacatt

SEQ ID NO: 1149 - DNA, 21 bp, artificial sequence
  siRNA reactive to human Eg5
  5'-terminal nucleic acid is a nucleoside, i.e. base + sugar but lacking 5'-phosphate
  modified_base 3, 4, 7, 9, 10, 12, 17, 18, 19: /mod_base = "2'-O-methyl corresponding base"
  modified_base 21: /mod_base = "5'-thio thymidine"
  modified_base 1, 2, 5, 6, 8, 11, 13, 14, 15, 16: /mod_base = "2'-hydroxy corresponding base"
agccaauguugugaggcuutt

SEQ ID NO: 1150 - DNA, 21 bp, artificial sequence
  siRNA reactive to human Eg5
  5'-terminal nucleic acid is a nucleoside, i.e. base + sugar but lacking 5'-phosphate
  modified_base 7, 9, 12: /mod_base = "2'-O-methyl corresponding base"
  modified_base 21: /mod_base = "5'-thio thymidine"
  modified_base 1, 2, 3, 4, 5, 6, 8, 10, 11, 13, 14, 15, 16, 17, 18, 19: /mod_base = "2'-hydroxy corresponding base"
aagccucacaacauuggcutt

SEQ ID NO: 1151 - DNA, 21 bp, artificial sequence
  siRNA reactive to human Eg5
  5'-terminal nucleic acid is a nucleoside, i.e. base + sugar but lacking 5'-phosphate
  modified_base 1, 2, 4, 9, 10, 11, 12, 16, 17, 18: /mod_base = "2'-O-methyl corresponding base"
  modified_base 21: /mod_base = "5'-thio thymidine"
  modified_base 3, 5, 6, 7, 8, 13, 14, 15, 19: /mod_base = "2'-hydroxy corresponding base"
uugugaggcuucaaguucatt

SEQ ID NO: 1152 - DNA, 21 bp, artificial sequence
  siRNA reactive to human Eg5
  5'-terminal nucleic acid is a nucleoside, i.e. base + sugar but lacking 5'-phosphate
  modified_base 15, 17: /mod_base = "2'-O-methyl corresponding base"
  modified_base 21: /mod_base = "5'-thio thymidine"
  modified_base 1, 2, 3, 4, 5, 6, 7, 8, 9, 10, 11, 12, 13, 14, 16, 18, 19: /mod_base = "2'-hydroxy corresponding base"
ugaacuugaagccucacaatt

SEQ ID NO: 1153 - DNA, 21 bp, artificial sequence
  siRNA reactive to human Eg5
  5'-terminal nucleic acid is a nucleoside, i.e. base + sugar but lacking 5'-phosphate
  modified_base 4, 7, 8, 9, 11, 18: /mod_base = "2'-O-methyl corresponding base"
  modified_base 21: /mod_base = "5'-thio thymidine"
  modified_base 1, 2, 3, 5, 6, 10, 12, 13, 14, 15, 16, 17, 19: /mod_base = "2'-hydroxy corresponding base"
aggcagcucaugagaaacatt

SEQ ID NO: 1154 - DNA, 21 bp, artificial sequence
  siRNA reactive to human Eg5
  5'-terminal nucleic acid is a nucleoside, i.e. base + sugar but lacking 5'-phosphate
  modified_base 8: /mod_base = "2'-O-methyl corresponding base"
  modified_base 21: /mod_base = "5'-thio thymidine"
  modified_base 1, 2, 3, 4, 5, 6, 7, 9, 10, 11, 12, 13, 14, 15, 16, 17, 18, 19: /mod_base = "2'-hydroxy corresponding base"
uguuucucaugagcugccutt

SEQ ID NO: 1155 - DNA, 21 bp, artificial sequence
  siRNA reactive to human Eg5
  5'-terminal nucleic acid is a nucleoside, i.e. base + sugar but lacking 5'-phosphate
  modified_base 2, 6, 7, 10, 13, 15: /mod_base = "2'-O-methyl corresponding base"
  modified_base 21: /mod_base = "5'-thio thymidine"
  modified_base 1, 3, 4, 5, 8, 9, 11, 12, 14, 16, 17, 18, 19: /mod_base = "2'-hydroxy corresponding base"
auaaauugauagcacaaaatt

SEQ ID NO: 1156 - DNA, 21 bp, artificial sequence
  siRNA reactive to human Eg5
  5'-terminal nucleic acid is a nucleoside, i.e. base + sugar but lacking 5'-phosphate
  modified_base 9, 12, 17: /mod_base = "2'-O-methyl corresponding base"
  modified_base 21: /mod_base = "5'-thio thymidine"
  modified_base 1, 2, 3, 4, 5, 6, 7, 8, 10, 11, 13, 14, 15, 16, 18, 19: /mod_base = "2'-hydroxy corresponding base"
uuuugugcuaucaauuuautt

SEQ ID NO: 1157 - DNA, 21 bp, artificial sequence
  siRNA reactive to human Eg5
  5'-terminal nucleic acid is a nucleoside, i.e. base + sugar but lacking 5'-phosphate
  modified_base 2, 7, 8, 9, 14, 15, 16, 19: /mod_base = "2'-O-methyl corresponding base"
  modified_base 21: /mod_base = "5'-thio thymidine"
  modified_base 1, 3, 4, 5, 6, 10, 11, 12, 13, 17, 18: /mod_base = "2'-hydroxy corresponding base"
acaaaaucuagaacuuaautt

SEQ ID NO: 1158 - DNA, 21 bp, artificial sequence
  siRNA reactive to human Eg5
  5'-terminal nucleic acid is a nucleoside, i.e. base + sugar but lacking 5'-phosphate
  modified_base 3, 10: /mod_base = "2'-O-methyl corresponding base"
  modified_base 21: /mod_base = "5'-thio thymidine"
  modified_base 1, 2, 4, 5, 6, 7, 8, 9, 11, 12, 13, 14, 15, 16, 17, 18, 19: /mod_base = "2'-hydroxy corresponding base"
auuaaguucuagauuuugutt

SEQ ID NO: 1159 - DNA, 21 bp, artificial sequence
  siRNA reactive to human Eg5
  5'-terminal nucleic acid is a nucleoside, i.e. base + sugar but lacking 5'-phosphate
  modified_base 3, 5, 6, 7, 8, 11, 15, 17: /mod_base = "2'-O-methyl corresponding base"
  modified_base 21: /mod_base = "5'-thio thymidine"
  modified_base 1, 2, 4, 9, 10, 12, 13, 14, 16, 18, 19: /mod_base = "2'-hydroxy corresponding base"
gauaucccaacagguacgatt

SEQ ID NO: 1160 - DNA, 21 bp, artificial sequence
  siRNA reactive to human Eg5
  5'-terminal nucleic acid is a nucleoside, i.e. base + sugar but lacking 5'-phosphate
  modified_base 4, 16: /mod_base = "2'-O-methyl corresponding base"
  modified_base 21: /mod_base = "5'-thio thymidine"
  modified_base 1, 2, 3, 5, 6, 7, 8, 9, 10, 11, 12, 13, 14, 15, 17, 18, 19: /mod_base = "2'-hydroxy corresponding base"
ucguaccuguugggauauctt

SEQ ID NO: 1161 - DNA, 21 bp, artificial sequence
  siRNA reactive to human Eg5
  5'-terminal nucleic acid is a nucleoside, i.e. base + sugar but lacking 5'-phosphate
  modified_base 4, 5, 7, 8, 9, 11, 13, 14, 15, 17, 18: /mod_base = "2'-O-methyl corresponding base"
  modified_base 21: /mod_base = "5'-thio thymidine"
  modified_base 1, 2, 3, 6, 10, 12, 16, 19: /mod_base = "2'-hydroxy corresponding base"
aaguuauuuauacccaucatt

SEQ ID NO: 1162 - DNA, 21 bp, artificial sequence
  siRNA reactive to human Eg5
  5'-terminal nucleic acid is a nucleoside, i.e. base + sugar but lacking 5'-phosphate
  modified_base 8, 10, 14: /mod_base = "2'-O-methyl corresponding base"
  modified_base 21: /mod_base = "5'-thio thymidine"
  modified_base 1, 2, 3, 4, 5, 6, 7, 9, 11, 12, 13, 15, 16, 17, 18, 19: /mod_base = "2'-hydroxy corresponding base"
ugauggguauaaauaacuutt

SEQ ID NO: 1163 - DNA, 21 bp, artificial sequence
  siRNA reactive to human Eg5
  5'-terminal nucleic acid is a nucleoside, i.e. base + sugar but lacking 5'-phosphate
  modified_base 1, 3, 7, 9, 11, 13, 14, 15, 16, 17: /mod_base = "2'-O-methyl corresponding base"
  modified_base 21: /mod_base = "5'-thio thymidine"
  modified_base 2, 4, 5, 6, 8, 10, 12, 18, 19: /mod_base = "2'-hydroxy corresponding base"
uguaaauacguauuucuagtt

SEQ ID NO: 1164 - DNA, 21 bp, artificial sequence
  siRNA reactive to human Eg5
  5'-terminal nucleic acid is a nucleoside, i.e. base + sugar but lacking 5'-phosphate
  modified_base 2, 8, 12, 16, 18: /mod_base = "2'-O-methyl corresponding base"
  modified_base 21: /mod_base = "5'-thio thymidine"
  modified_base 1, 3, 4, 5, 6, 7, 9, 10, 11, 13, 14, 15, 17, 19: /mod_base = "2'-hydroxy corresponding base"
cuagaaauacguauuuacatt

SEQ ID NO: 1165 - DNA, 21 bp, artificial sequence
  siRNA reactive to human Eg5
  5'-terminal nucleic acid is a nucleoside, i.e. base + sugar but lacking 5'-phosphate
  modified_base 1, 2, 3, 6, 7, 8, 9, 10, 12, 14, 19: /mod_base = "2'-O-methyl corresponding base"
  modified_base 21: /mod_base = "5'-thio thymidine"
  modified_base 4, 5, 11, 13, 15, 16, 17, 18: /mod_base = "2'-hydroxy corresponding base"
ucuaguuuucauauaaagutt

SEQ ID NO: 1166 - DNA, 21 bp, artificial sequence
  siRNA reactive to human Eg5
  5'-terminal nucleic acid is a nucleoside, i.e. base + sugar but lacking 5'-phosphate
  modified_base 5, 7, 16: /mod_base = "2'-O-methyl corresponding base"
  modified_base 21: /mod_base = "5'-thio thymidine"
  modified_base 1, 2, 3, 4, 6, 8, 9, 10, 11, 12, 13, 14, 15, 17, 18, 19: /mod_base = "2'-hydroxy corresponding base"
acuuuauaugaaaacuagatt

SEQ ID NO: 1167 - DNA, 21 bp, artificial sequence
  siRNA reactive to human Eg5
  5'-terminal nucleic acid is a nucleoside, i.e. base + sugar but lacking 5'-phosphate
  modified_base 2, 7, 10, 11, 12, 13, 14, 15, 16, 18: /mod_base = "2'-O-methyl corresponding base"
  modified_base 21: /mod_base = "5'-thio thymidine"
  modified_base 1, 3, 4, 5, 6, 8, 9, 17, 19: /mod_base = "2'-hydroxy corresponding base"
auaaaguaguucuuuuauatt

SEQ ID NO: 1168 - DNA, 21 bp, artificial sequence
  siRNA reactive to human Eg5
  5'-terminal nucleic acid is a nucleoside, i.e. base + sugar but lacking 5'-phosphate
  modified_base 1, 3, 12, 17: /mod_base = "2'-O-methyl corresponding base"
  modified_base 21: /mod_base = "5'-thio thymidine"
  modified_base 2, 4, 5, 6, 7, 8, 9, 10, 11, 13, 14, 15, 16, 18, 19: /mod_base = "2'-hydroxy corresponding base"
uauaaaagaacuacuuuautt

SEQ ID NO: 1169 - DNA, 21 bp, artificial sequence
  siRNA reactive to human Eg5
  5'-terminal nucleic acid is a nucleoside, i.e. base + sugar but lacking 5'-phosphate
  modified_base 1, 2, 4, 5, 6, 8, 13, 14, 16: /mod_base = "2'-O-methyl corresponding base"
  modified_base 21: /mod_base = "5'-thio thymidine"
  modified_base 3, 7, 9, 10, 11, 12, 15, 17, 18, 19: /mod_base = "2'-hydroxy corresponding base"
ccauuuguagagcuacaaatt

SEQ ID NO: 1170 - DNA, 21 bp, artificial sequence
  siRNA reactive to human Eg5
  5'-terminal nucleic acid is a nucleoside, i.e. base + sugar but lacking 5'-phosphate
  modified_base 5, 11, 13: /mod_base = "2'-O-methyl corresponding base"
  modified_base 21: /mod_base = "5'-thio thymidine"
  modified_base 1, 2, 3, 4, 6, 7, 8, 9, 10, 12, 14, 15, 16, 17, 18, 19: /mod_base = "2'-hydroxy corresponding base"
uuuguagcucuacaaauggtt

SEQ ID NO: 1171 - DNA, 21 bp, artificial sequence
  siRNA reactive to human Eg5
  5'-terminal nucleic acid is a nucleoside, i.e. base + sugar but lacking 5'-phosphate
  modified_base 1, 3, 4, 5, 6, 7, 10, 13, 14, 19: /mod_base = "2'-O-methyl corresponding base"
  modified_base 21: /mod_base = "5'-thio thymidine"
  modified_base 2, 8, 9, 11, 12, 15, 16, 17, 18: /mod_base = "2'-hydroxy corresponding base"
uauuuucaguagucagaautt

SEQ ID NO: 1172 - DNA, 21 bp, artificial sequence
  siRNA reactive to human Eg5
  5'-terminal nucleic acid is a nucleoside, i.e. base + sugar but lacking 5'-phosphate
  modified_base 9, 18: /mod_base = "2'-O-methyl corresponding base"
  modified_base 21: /mod_base = "5'-thio thymidine"
  modified_base 1, 2, 3, 4, 5, 6, 7, 8, 10, 11, 12, 13, 14, 15, 16, 17, 19: /mod_base = "2'-hydroxy corresponding base"
auucugacuacugaaaauatt

SEQ ID NO: 1173 - DNA, 21 bp, artificial sequence
  siRNA reactive to human Eg5
  5'-terminal nucleic acid is a nucleoside, i.e. base + sugar but lacking 5'-phosphate
  modified_base 4, 5, 6, 9, 10, 11, 12, 15, 16, 18: /mod_base = "2'-O-methyl corresponding base"
  modified_base 21: /mod_base = "5'-thio thymidine"
  modified_base 1, 2, 3, 7, 8, 13, 14, 17, 19: /mod_base = "2'-hydroxy corresponding base"
aaaucuaacccuaguuguatt

SEQ ID NO: 1174 - DNA, 21 bp, artificial sequence
  siRNA reactive to human Eg5
  5'-terminal nucleic acid is a nucleoside, i.e. base + sugar but lacking 5'-phosphate
  modified_base 1, 3, 7, 13: /mod_base = "2'-O-methyl corresponding base"
  modified_base 21: /mod_base = "5'-thio thymidine"
  modified_base 2, 4, 5, 6, 8, 9, 10, 11, 12, 14, 15, 16, 17, 18, 19: /mod_base = "2'-hydroxy corresponding base"
uacaacuaggguuagauuutt

SEQ ID NO: 1175 - DNA, 21 bp, artificial sequence
  siRNA reactive to human Eg5
  5'-terminal nucleic acid is a nucleoside, i.e. base + sugar but lacking 5'-phosphate
  modified_base 1, 2, 3, 4, 9, 11, 13, 15, 16, 18, 19: /mod_base = "2'-O-methyl corresponding base"
  modified_base 21: /mod_base = "5'-thio thymidine"
  modified_base 5, 6, 7, 8, 10, 12, 14, 17: /mod_base = "2'-hydroxy corresponding base"
cuuuagaguauacauugcutt

SEQ ID NO: 1176 - DNA, 21 bp, artificial sequence
  siRNA reactive to human Eg5
  5'-terminal nucleic acid is a nucleoside, i.e. base + sugar but lacking 5'-phosphate
  modified_base 3, 8, 10, 15: /mod_base = "2'-O-methyl corresponding base"
  modified_base 21: /mod_base = "5'-thio thymidine"
  modified_base 1, 2, 4, 5, 6, 7, 9, 11, 12, 13, 14, 16, 17, 18, 19: /mod_base = "2'-hydroxy corresponding base"
agcaauguauacucuaaagtt

SEQ ID NO: 1177 - DNA, 21 bp, artificial sequence
  siRNA reactive to human Eg5
  5'-terminal nucleic acid is a nucleoside, i.e. base + sugar but lacking 5'-phosphate
  modified_base 2, 3, 4, 7, 8, 11, 14, 15, 16, 17, 19: /mod_base = "2'-O-methyl corresponding base"
  modified_base 21: /mod_base = "5'-thio thymidine"
  modified_base 1, 5, 6, 9, 10, 12, 13, 18: /mod_base = "2'-hydroxy corresponding base"
aucugacuaauggcucugutt

SEQ ID NO: 1178 - DNA, 21 bp, artificial sequence
  siRNA reactive to human Eg5
  5'-terminal nucleic acid is a nucleoside, i.e. base + sugar but lacking 5'-phosphate
  modified_base 2, 8, 11, 15: /mod_base = "2'-O-methyl corresponding base"
  modified_base 21: /mod_base = "5'-thio thymidine"
  modified_base 1, 3, 4, 5, 6, 7, 9, 10, 12, 13, 14, 16, 17, 18, 19: /mod_base = "2'-hydroxy corresponding base"
acagagccauuagucagautt

SEQ ID NO: 1179 - DNA, 21 bp, artificial sequence
  siRNA reactive to human Eg5
  5'-terminal nucleic acid is a nucleoside, i.e. base + sugar but lacking 5'-phosphate
  modified_base 1, 3, 6, 9, 10, 11, 17, 18: /mod_base = "2'-O-methyl corresponding base"
  modified_base 21: /mod_base = "5'-thio thymidine"
  modified_base 2, 4, 5, 7, 8, 12, 13, 14, 15, 16, 19: /mod_base = "2'-hydroxy corresponding base"
cacaaugauuuaaggacugtt

SEQ ID NO: 1180 - DNA, 21 bp, artificial sequence
  siRNA reactive to human Eg5
  5'-terminal nucleic acid is a nucleoside, i.e. base + sugar but lacking 5'-phosphate
  modified_base 1, 8, 13: /mod_base = "2'-O-methyl corresponding base"
  modified_base 21: /mod_base = "5'-thio thymidine"
  modified_base 2, 3, 4, 5, 6, 7, 9, 10, 11, 12, 14, 15, 16, 17, 18, 19: /mod_base = "2'-hydroxy corresponding base"
caguccuuaaaucauugugtt

SEQ ID NO: 1181 - DNA, 21 bp, artificial sequence
  siRNA reactive to human Eg5
  5'-terminal nucleic acid is a nucleoside, i.e. base + sugar but lacking 5'-phosphate
  modified_base 1, 2, 3, 4, 5, 6, 7, 8, 9, 10, 13, 14, 15, 19: /mod_base = "2'-O-methyl corresponding base"
  modified_base 21: /mod_base = "5'-thio thymidine"
  modified_base 11, 12, 16, 17, 18: /mod_base = "2'-hydroxy corresponding base"
ucuuuuucucgauucaaautt

SEQ ID NO: 1182 - DNA, 21 bp, artificial sequence
  siRNA reactive to human Eg5
  5'-terminal nucleic acid is a nucleoside, i.e. base + sugar but lacking 5'-phosphate
  modified_base 4: /mod_base = "2'-O-methyl corresponding base"
  modified_base 21: /mod_base = "5'-thio thymidine"
  modified_base 1, 2, 3, 5, 6, 7, 8, 9, 10, 11, 12, 13, 14, 15, 16, 17, 18, 19: /mod_base = "2'-hydroxy corresponding base"
auuugaaucgagaaaaagatt

SEQ ID NO: 1183 - DNA, 21 bp, artificial sequence
  siRNA reactive to human Eg5
  5'-terminal nucleic acid is a nucleoside, i.e. base + sugar but lacking 5'-phosphate
  modified_base 1, 2, 3, 4, 5, 6, 7, 8, 9, 12, 13, 14, 18, 19: /mod_base = "2'-O-methyl corresponding base"
  modified_base 21: /mod_base = "5'-thio thymidine"
  modified_base 10, 11, 15, 16, 17: /mod_base = "2'-hydroxy corresponding base"
cuuuuucucgauucaaauctt

SEQ ID NO: 1184 - DNA, 21 bp, artificial sequence
  siRNA reactive to human Eg5
  5'-terminal nucleic acid is a nucleoside, i.e. base + sugar but lacking 5'-phosphate
  modified_base 5: /mod_base = "2'-O-methyl corresponding base"
  modified_base 21: /mod_base = "5'-thio thymidine"
  modified_base 1, 2, 3, 4, 6, 7, 8, 9, 10, 11, 12, 13, 14, 15, 16, 17, 18, 19: /mod_base = "2'-hydroxy corresponding base"
gauuugaaucgagaaaaagtt

SEQ ID NO: 1185 - DNA, 21 bp, artificial sequence
  siRNA reactive to human Eg5
  5'-terminal nucleic acid is a nucleoside, i.e. base + sugar but lacking 5'-phosphate
  modified_base 2, 3, 4, 5, 6, 7, 9, 10, 11, 13, 16: /mod_base = "2'-O-methyl corresponding base"
  modified_base 21: /mod_base = "5'-thio thymidine"
  modified_base 1, 8, 12, 14, 15, 17, 18, 19: /mod_base = "2'-hydroxy corresponding base"
auuuucugcucacgaugagtt

SEQ ID NO: 1186 - DNA, 21 bp, artificial sequence
  siRNA reactive to human Eg5
  5'-terminal nucleic acid is a nucleoside, i.e. base + sugar but lacking 5'-phosphate
  modified_base 3, 12: /mod_base = "2'-O-methyl corresponding base"
  modified_base 21: /mod_base = "5'-thio thymidine"
  modified_base 1, 2, 4, 5, 6, 7, 8, 9, 10, 11, 13, 14, 15, 16, 17, 18, 19: /mod_base = "2'-hydroxy corresponding base"
cucaucgugagcagaaaautt

SEQ ID NO: 1187 - DNA, 21 bp, artificial sequence
  siRNA reactive to human Eg5
  5'-terminal nucleic acid is a nucleoside, i.e. base + sugar but lacking 5'-phosphate
  modified_base 1, 2, 3, 4, 5, 7, 8, 9, 11, 14, 18, 19: /mod_base = "2'-O-methyl corresponding base"
  modified_base 21: /mod_base = "5'-thio thymidine"
  modified_base 6, 10, 12, 13, 15, 16, 17: /mod_base = "2'-hydroxy corresponding base"
uuucugcucacgaugaguutt

SEQ ID NO: 1188 - DNA, 21 bp, artificial sequence
  siRNA reactive to human Eg5
  5'-terminal nucleic acid is a nucleoside, i.e. base + sugar but lacking 5'-phosphate
  modified_base 5, 14: /mod_base = "2'-O-methyl corresponding base"
  modified_base 21: /mod_base = "5'-thio thymidine"
  modified_base 1, 2, 3, 4, 6, 7, 8, 9, 10, 11, 12, 13, 15, 16, 17, 18, 19: /mod_base = "2'-hydroxy corresponding base"
aacucaucgugagcagaaatt

SEQ ID NO: 1189 - DNA, 21 bp, artificial sequence
  siRNA reactive to human Eg5
  5'-terminal nucleic acid is a nucleoside, i.e. base + sugar but lacking 5'-phosphate
  modified_base 5, 6, 8, 13, 14, 15, 17, 18, 19: /mod_base = "2'-O-methyl corresponding base"
  modified_base 21: /mod_base = "5'-thio thymidine"
  modified_base 1, 2, 3, 4, 7, 9, 10, 11, 12, 16: /mod_base = "2'-hydroxy corresponding base"
agagcuacaaaaccuaucctt

SEQ ID NO: 1190 - DNA, 21 bp, artificial sequence
  siRNA reactive to human Eg5
  5'-terminal nucleic acid is a nucleoside, i.e. base + sugar but lacking 5'-phosphate
  modified_base 4, 13: /mod_base = "2'-O-methyl corresponding base"
  modified_base 21: /mod_base = "5'-thio thymidine"
  modified_base 1, 2, 3, 5, 6, 7, 8, 9, 10, 11, 12, 14, 15, 16, 17, 18, 19: /mod_base = "2'-hydroxy corresponding base"
ggauagguuuuguagcucutt

SEQ ID NO: 1191 - DNA, 21 bp, artificial sequence
  siRNA reactive to human Eg5
  5'-terminal nucleic acid is a nucleoside, i.e. base + sugar but lacking 5'-phosphate
  modified_base 4, 5, 11, 13, 15, 16, 18, 19: /mod_base = "2'-O-methyl corresponding base"
  modified_base 21: /mod_base = "5'-thio thymidine"
  modified_base 1, 2, 3, 6, 7, 8, 9, 10, 12, 14, 17: /mod_base = "2'-hydroxy corresponding base"
gagccaaagguacaccacutt

SEQ ID NO: 1192 - DNA, 21 bp, artificial sequence
  siRNA reactive to human Eg5
  5'-terminal nucleic acid is a nucleoside, i.e. base + sugar but lacking 5'-phosphate
  modified_base 8: /mod_base = "2'-O-methyl corresponding base"
  modified_base 21: /mod_base = "5'-thio thymidine"
  modified_base 1, 2, 3, 4, 5, 6, 7, 9, 10, 11, 12, 13, 14, 15, 16, 17, 18, 19: /mod_base = "2'-hydroxy corresponding base"
agugguguaccuuuggcuctt

SEQ ID NO: 1193 - DNA, 21 bp, artificial sequence
  siRNA reactive to human Eg5
  5'-terminal nucleic acid is a nucleoside, i.e. base + sugar but lacking 5'-phosphate
  modified_base 2, 3, 9, 11, 13, 14, 16, 17, 19: /mod_base = "2'-O-methyl corresponding base"
  modified_base 21: /mod_base = "5'-thio thymidine"
  modified_base 1, 4, 5, 6, 7, 8, 10, 12, 15, 18: /mod_base = "2'-hydroxy corresponding base"
gccaaagguacaccacuactt

SEQ ID NO: 1194 - DNA, 21 bp, artificial sequence
  siRNA reactive to human Eg5
  5'-terminal nucleic acid is a nucleoside, i.e. base + sugar but lacking 5'-phosphate
  modified_base 2, 10: /mod_base = "2'-O-methyl corresponding base"
  modified_base 21: /mod_base = "5'-thio thymidine"
  modified_base 1, 3, 4, 5, 6, 7, 8, 9, 11, 12, 13, 14, 15, 16, 17, 18, 19: /mod_base = "2'-hydroxy corresponding base"
guagugguguaccuuuggctt

SEQ ID NO: 1195 - DNA, 21 bp, artificial sequence
  siRNA reactive to human Eg5
  5'-terminal nucleic acid is a nucleoside, i.e. base + sugar but lacking 5'-phosphate
  modified_base 4, 5, 7, 9, 10, 11, 12, 13, 14, 15, 16, 19: /mod_base = "2'-O-methyl corresponding base"
  modified_base 21: /mod_base = "5'-thio thymidine"
  modified_base 1, 2, 3, 6, 8, 17, 18: /mod_base = "2'-hydroxy corresponding base"
gaacuguacucuucucagctt

SEQ ID NO: 1196 - DNA, 21 bp, artificial sequence
  siRNA reactive to human Eg5
  5'-terminal nucleic acid is a nucleoside, i.e. base + sugar but lacking 5'-phosphate
  modified_base 12, 14: /mod_base = "2'-O-methyl corresponding base"
  modified_base 21: /mod_base = "5'-thio thymidine"
  modified_base 1, 2, 3, 4, 5, 6, 7, 8, 9, 10, 11, 13, 15, 16, 17, 18, 19: /mod_base = "2'-hydroxy corresponding base"
gcugagaagaguacaguuctt

SEQ ID NO: 1197 - DNA, 21 bp, artificial sequence
  siRNA reactive to human Eg5
  5'-terminal nucleic acid is a nucleoside, i.e. base + sugar but lacking 5'-phosphate
  modified_base 4, 8, 10, 11, 13, 14, 17, 19: /mod_base = "2'-O-methyl corresponding base"
  modified_base 21: /mod_base = "5'-thio thymidine"
  modified_base 1, 2, 3, 5, 6, 7, 9, 12, 15, 16, 18: /mod_base = "2'-hydroxy corresponding base"
agguaaauaucaccaacautt

SEQ ID NO: 1198 - DNA, 21 bp, artificial sequence
  siRNA reactive to human Eg5
  5'-terminal nucleic acid is a nucleoside, i.e. base + sugar but lacking 5'-phosphate
  modified_base 11, 15: /mod_base = "2'-O-methyl corresponding base"
  modified_base 21: /mod_base = "5'-thio thymidine"
  modified_base 1, 2, 3, 4, 5, 6, 7, 8, 9, 10, 12, 13, 14, 16, 17, 18, 19: /mod_base = "2'-hydroxy corresponding base"
auguuggugauauuuaccutt

SEQ ID NO: 1199 - DNA, 21 bp, artificial sequence
  siRNA reactive to human Eg5
  5'-terminal nucleic acid is a nucleoside, i.e. base + sugar but lacking 5'-phosphate
  modified_base 3, 4, 6, 11, 12, 13, 15, 16, 17, 18, 19: /mod_base = "2'-O-methyl corresponding base"
  modified_base 21: /mod_base = "5'-thio thymidine"
  modified_base 1, 2, 5, 7, 8, 9, 10, 14: /mod_base = "2'-hydroxy corresponding base"
agcuacaaaaccuauccuutt

SEQ ID NO: 1200 - DNA, 21 bp, artificial sequence
  siRNA reactive to human Eg5
  5'-terminal nucleic acid is a nucleoside, i.e. base + sugar but lacking 5'-phosphate
  modified_base 6, 15: /mod_base = "2'-O-methyl corresponding base"
  modified_base 21: /mod_base = "5'-thio thymidine"
  modified_base 1, 2, 3, 4, 5, 7, 8, 9, 10, 11, 12, 13, 14, 16, 17, 18, 19: /mod_base = "2'-hydroxy corresponding base"
aaggauagguuuuguagcutt

SEQ ID NO: 1201 - DNA, 21 bp, artificial sequence
  siRNA reactive to human Eg5
  5'-terminal nucleic acid is a nucleoside, i.e. base + sugar but lacking 5'-phosphate
  modified_base 1, 3, 9, 11, 12, 13, 16, 17, 18, 19: /mod_base = "2'-O-methyl corresponding base"
  modified_base 21: /mod_base = "5'-thio thymidine"
  modified_base 2, 4, 5, 6, 7, 8, 10, 14, 15: /mod_base = "2'-hydroxy corresponding base"
ugugaaagcauuuaauucctt

SEQ ID NO: 1202 - DNA, 21 bp, artificial sequence
  siRNA reactive to human Eg5
  5'-terminal nucleic acid is a nucleoside, i.e. base + sugar but lacking 5'-phosphate
  modified_base 6, 16, 18: /mod_base = "2'-O-methyl corresponding base"
  modified_base 21: /mod_base = "5'-thio thymidine"
  modified_base 1, 2, 3, 4, 5, 7, 8, 9, 10, 11, 12, 13, 14, 15, 17, 19: /mod_base = "2'-hydroxy corresponding base"
ggaauuaaaugcuuucacatt

SEQ ID NO: 1203 - DNA, 21 bp, artificial sequence
  siRNA reactive to human Eg5
  5'-terminal nucleic acid is a nucleoside, i.e. base + sugar but lacking 5'-phosphate
  modified_base 2, 3, 4, 6, 7, 8, 9, 14, 16, 18: /mod_base = "2'-O-methyl corresponding base"
  modified_base 21: /mod_base = "5'-thio thymidine"
  modified_base 1, 5, 10, 11, 12, 13, 15, 17, 19: /mod_base = "2'-hydroxy corresponding base"
gcccacuuuagaguauacatt

SEQ ID NO: 1204 - DNA, 21 bp, artificial sequence
  siRNA reactive to human Eg5
  5'-terminal nucleic acid is a nucleoside, i.e. base + sugar but lacking 5'-phosphate
  modified_base 3, 5, 10: /mod_base = "2'-O-methyl corresponding base"
  modified_base 21: /mod_base = "5'-thio thymidine"
  modified_base 1, 2, 4, 6, 7, 8, 9, 11, 12, 13, 14, 15, 16, 17, 18, 19: /mod_base = "2'-hydroxy corresponding base"
uguauacucuaaagugggctt

SEQ ID NO: 1205 - DNA, 21 bp, artificial sequence
  siRNA reactive to human Eg5
  5'-terminal nucleic acid is a nucleoside, i.e. base + sugar but lacking 5'-phosphate
  modified_base 1, 3, 5, 6, 8, 10, 11, 12, 13, 18, 19: /mod_base = "2'-O-methyl corresponding base"
  modified_base 21: /mod_base = "5'-thio thymidine"
  modified_base 2, 4, 7, 9, 14, 15, 16, 17: /mod_base = "2'-hydroxy corresponding base"
ugugccacacuccaagacctt

SEQ ID NO: 1206 - DNA, 21 bp, artificial sequence
  siRNA reactive to human Eg5
  5'-terminal nucleic acid is a nucleoside, i.e. base + sugar but lacking 5'-phosphate
  modified_base 16, 18: /mod_base = "2'-O-methyl corresponding base"
  modified_base 21: /mod_base = "5'-thio thymidine"
  modified_base 1, 2, 3, 4, 5, 6, 7, 8, 9, 10, 11, 12, 13, 14, 15, 17, 19: /mod_base = "2'-hydroxy corresponding base"
ggucuuggaguguggcacatt

SEQ ID NO: 1207 - DNA, 21 bp, artificial sequence
  siRNA reactive to human Eg5
  5'-terminal nucleic acid is a nucleoside, i.e. base + sugar but lacking 5'-phosphate
  modified_base 4, 5, 9, 10, 13, 14, 15, 16, 18: /mod_base = "2'-O-methyl corresponding base"
  modified_base 21: /mod_base = "5'-thio thymidine"
  modified_base 1, 2, 3, 6, 7, 8, 11, 12, 17, 19: /mod_base = "2'-hydroxy corresponding base"
aaacuaaauugaucucguatt

SEQ ID NO: 1208 - DNA, 21 bp, artificial sequence
  siRNA reactive to human Eg5
  5'-terminal nucleic acid is a nucleoside, i.e. base + sugar but lacking 5'-phosphate
  modified_base 1, 9, 14: /mod_base = "2'-O-methyl corresponding base"
  modified_base 21: /mod_base = "5'-thio thymidine"
  modified_base 2, 3, 4, 5, 6, 7, 8, 10, 11, 12, 13, 15, 16, 17, 18, 19: /mod_base = "2'-hydroxy corresponding base"
uacgagaucaauuuaguuutt

SEQ ID NO: 1209 - DNA, 21 bp, artificial sequence
  siRNA reactive to human Eg5
  5'-terminal nucleic acid is a nucleoside, i.e. base + sugar but lacking 5'-phosphate
  modified_base 1, 4, 5, 6, 7, 9, 14, 15, 17, 18, 19: /mod_base = "2'-O-methyl corresponding base"
  modified_base 21: /mod_base = "5'-thio thymidine"
  modified_base 2, 3, 8, 10, 11, 12, 13, 16: /mod_base = "2'-hydroxy corresponding base"
ugaucucguagaauuaucutt

SEQ ID NO: 1210 - DNA, 21 bp, artificial sequence
  siRNA reactive to human Eg5
  5'-terminal nucleic acid is a nucleoside, i.e. base + sugar but lacking 5'-phosphate
  modified_base 4, 10, 18: /mod_base = "2'-O-methyl corresponding base"
  modified_base 21: /mod_base = "5'-thio thymidine"
  modified_base 1, 2, 3, 5, 6, 7, 8, 9, 11, 12, 13, 14, 15, 16, 17, 19: /mod_base = "2'-hydroxy corresponding base"
agauaauucuacgagaucatt

SEQ ID NO: 1211 - DNA, 21 bp, artificial sequence
  siRNA reactive to human Eg5
  5'-terminal nucleic acid is a nucleoside, i.e. base + sugar but lacking 5'-phosphate
  modified_base 2, 4, 6, 9, 10, 13, 14, 15, 16, 17, 18: /mod_base = "2'-O-methyl corresponding base"
  modified_base 21: /mod_base = "5'-thio thymidine"
  modified_base 1, 3, 5, 7, 8, 11, 12, 19: /mod_base = "2'-hydroxy corresponding base"
gcgugcagucgguccuccatt

SEQ ID NO: 1212 - DNA, 21 bp, artificial sequence
  siRNA reactive to human Eg5
  5'-terminal nucleic acid is a nucleoside, i.e. base + sugar but lacking 5'-phosphate
  modified_base 15: /mod_base = "2'-O-methyl corresponding base"
  modified_base 21: /mod_base = "5'-thio thymidine"
  modified_base 1, 2, 3, 4, 5, 6, 7, 8, 9, 10, 11, 12, 13, 14, 16, 17, 18, 19: /mod_base = "2'-hydroxy corresponding base"
uggaggaccgacugcacgctt

SEQ ID NO: 1213 - DNA, 21 bp, artificial sequence
  siRNA reactive to human Eg5
  5'-terminal nucleic acid is a nucleoside, i.e. base + sugar but lacking 5'-phosphate
  modified_base 5, 6, 7, 13, 15, 16, 17: /mod_base = "2'-O-methyl corresponding base"
  modified_base 21: /mod_base = "5'-thio thymidine"
  modified_base 1, 2, 3, 4, 8, 9, 10, 11, 12, 14, 18, 19: /mod_base = "2'-hydroxy corresponding base"
aaaguuuagagacaucugatt

SEQ ID NO: 1214 - DNA, 21 bp, artificial sequence
  siRNA reactive to human Eg5
  5'-terminal nucleic acid is a nucleoside, i.e. base + sugar but lacking 5'-phosphate
  modified_base 2, 12: /mod_base = "2'-O-methyl corresponding base"
  modified_base 21: /mod_base = "5'-thio thymidine"
  modified_base 1, 3, 4, 5, 6, 7, 8, 9, 10, 11, 13, 14, 15, 16, 17, 18, 19: /mod_base = "2'-hydroxy corresponding base"
ucagaugucucuaaacuuutt

SEQ ID NO: 1215 - DNA, 21 bp, artificial sequence
  siRNA reactive to human Eg5
  5'-terminal nucleic acid is a nucleoside, i.e. base + sugar but lacking 5'-phosphate
  modified_base 1, 10, 12, 14, 16: /mod_base = "2'-O-methyl corresponding base"
  modified_base 21: /mod_base = "5'-thio thymidine"
  modified_base 2, 3, 4, 5, 6, 7, 8, 9, 11, 13, 15, 17, 18, 19: /mod_base = "2'-hydroxy corresponding base"
cagaaggaauauguacaaatt

SEQ ID NO: 1216 - DNA, 21 bp, artificial sequence
  siRNA reactive to human Eg5
  5'-terminal nucleic acid is a nucleoside, i.e. base + sugar but lacking 5'-phosphate
  modified_base 5, 7, 9: /mod_base = "2'-O-methyl corresponding base"
  modified_base 21: /mod_base = "5'-thio thymidine"
  modified_base 1, 2, 3, 4, 6, 8, 10, 11, 12, 13, 14, 15, 16, 17, 18, 19: /mod_base = "2'-hydroxy corresponding base"
uuuguacauauuccuucugtt

SEQ ID NO: 1217 - DNA, 21 bp, artificial sequence
  siRNA reactive to human Eg5
  5'-terminal nucleic acid is a nucleoside, i.e. base + sugar but lacking 5'-phosphate
  modified_base 1, 3, 4, 5, 11, 13, 14: /mod_base = "2'-O-methyl corresponding base"
  modified_base 21: /mod_base = "5'-thio thymidine"
  modified_base 2, 6, 7, 8, 9, 10, 12, 15, 16, 17, 18, 19: /mod_base = "2'-hydroxy corresponding base"
cgcccgagaguaccagggatt

SEQ ID NO: 1218 - DNA, 21 bp, artificial sequence
  siRNA reactive to human Eg5
  5'-terminal nucleic acid is a nucleoside, i.e. base + sugar but lacking 5'-phosphate
  modified_base 8: /mod_base = "2'-O-methyl corresponding base"
  modified_base 21: /mod_base = "5'-thio thymidine"
  modified_base 1, 2, 3, 4, 5, 6, 7, 9, 10, 11, 12, 13, 14, 15, 16, 17, 18, 19: /mod_base = "2'-hydroxy corresponding base"
ucccugguacucucgggcgtt

SEQ ID NO: 1219 - DNA, 21 bp, artificial sequence
  siRNA reactive to human Eg5
  5'-terminal nucleic acid is a nucleoside, i.e. base + sugar but lacking 5'-phosphate
  modified_base 1, 10, 15, 17, 18, 19: /mod_base = "2'-O-methyl corresponding base"
  modified_base 21: /mod_base = "5'-thio thymidine"
  modified_base 2, 3, 4, 5, 6, 7, 8, 9, 11, 12, 13, 14, 16: /mod_base = "2'-hydroxy corresponding base"
cggaggagauagaacguuutt

SEQ ID NO: 1220 - DNA, 21 bp, artificial sequence
  siRNA reactive to human Eg5
  5'-terminal nucleic acid is a nucleoside, i.e. base + sugar but lacking 5'-phosphate
  modified_base 9: /mod_base = "2'-O-methyl corresponding base"
  modified_base 21: /mod_base = "5'-thio thymidine"
  modified_base 1, 2, 3, 4, 5, 6, 7, 8, 10, 11, 12, 13, 14, 15, 16, 17, 18, 19: /mod_base = "2'-hydroxy corresponding base"
aaacguucuaucuccuccgtt

SEQ ID NO: 1221 - DNA, 21 bp, artificial sequence
  siRNA reactive to human Eg5
  5'-terminal nucleic acid is a nucleoside, i.e. base + sugar but lacking 5'-phosphate
  modified_base 4, 9, 11, 12, 13, 18: /mod_base = "2'-O-methyl corresponding base"
  modified_base 21: /mod_base = "5'-thio thymidine"
  modified_base 1, 2, 3, 5, 6, 7, 8, 10, 14, 15, 16, 17, 19: /mod_base = "2'-hydroxy corresponding base"
agauagaacguuuaaaacgtt

SEQ ID NO: 1222 - DNA, 21 bp, artificial sequence
  siRNA reactive to human Eg5
  5'-terminal nucleic acid is a nucleoside, i.e. base + sugar but lacking 5'-phosphate
  modified_base 6, 15: /mod_base = "2'-O-methyl corresponding base"
  modified_base 21: /mod_base = "5'-thio thymidine"
  modified_base 1, 2, 3, 4, 5, 7, 8, 9, 10, 11, 12, 13, 14, 16, 17, 18, 19: /mod_base = "2'-hydroxy corresponding base"
cguuuuaaacguucuaucutt

SEQ ID NO: 1223 - DNA, 21 bp, artificial sequence
  siRNA reactive to human Eg5
  5'-terminal nucleic acid is a nucleoside, i.e. base + sugar but lacking 5'-phosphate
  modified_base 5, 11, 12, 13, 14, 16, 19: /mod_base = "2'-O-methyl corresponding base"
  modified_base 21: /mod_base = "5'-thio thymidine"
  modified_base 1, 2, 3, 4, 6, 7, 8, 9, 10, 15, 17, 18: /mod_base = "2'-hydroxy corresponding base"
ggaacaggaacuucacaactt

SEQ ID NO: 1224 - DNA, 21 bp, artificial sequence
  siRNA reactive to human Eg5
  5'-terminal nucleic acid is a nucleoside, i.e. base + sugar but lacking 5'-phosphate
  modified_base 3, 5, 14: /mod_base = "2'-O-methyl corresponding base"
  modified_base 21: /mod_base = "5'-thio thymidine"
  modified_base 1, 2, 4, 6, 7, 8, 9, 10, 11, 12, 13, 15, 16, 17, 18, 19: /mod_base = "2'-hydroxy corresponding base"
guugugaaguuccuguucctt

SEQ ID NO: 1225 - DNA, 21 bp, artificial sequence
  siRNA reactive to human Eg5
  5'-terminal nucleic acid is a nucleoside, i.e. base + sugar but lacking 5'-phosphate
  modified_base 2, 6, 7, 13, 15, 17, 18: /mod_base = "2'-O-methyl corresponding base"
  modified_base 21: /mod_base = "5'-thio thymidine"
  modified_base 1, 3, 4, 5, 8, 9, 10, 11, 12, 14, 16, 19: /mod_base = "2'-hydroxy corresponding base"
gugagccaaagguacaccatt

SEQ ID NO: 1226 - DNA, 21 bp, artificial sequence
  siRNA reactive to human Eg5
  5'-terminal nucleic acid is a nucleoside, i.e. base + sugar but lacking 5'-phosphate
  modified_base 6, 17: /mod_base = "2'-O-methyl corresponding base"
  modified_base 21: /mod_base = "5'-thio thymidine"
  modified_base 1, 2, 3, 4, 5, 7, 8, 9, 10, 11, 12, 13, 14, 15, 16, 18, 19: /mod_base = "2'-hydroxy corresponding base"
ugguguaccuuuggcucactt

SEQ ID NO: 1227 - DNA, 21 bp, artificial sequence
  siRNA reactive to human Eg5
  5'-terminal nucleic acid is a nucleoside, i.e. base + sugar but lacking 5'-phosphate
  modified_base 2, 3, 4, 5, 6, 7, 8, 9, 13, 14, 15, 16, 17, 18, 19: /mod_base = "2'-O-methyl corresponding base"
  modified_base 21: /mod_base = "5'-thio thymidine"
  modified_base 1, 10, 11, 12: /mod_base = "2'-hydroxy corresponding base"
auccucccuagacuucccutt

SEQ ID NO: 1228 - DNA, 21 bp, artificial sequence
  siRNA reactive to human Eg5
  5'-terminal nucleic acid is a nucleoside, i.e. base + sugar but lacking 5'-phosphate
  modified_base 10: /mod_base = "2'-O-methyl corresponding base"
  modified_base 21: /mod_base = "5'-thio thymidine"
  modified_base 1, 2, 3, 4, 5, 6, 7, 8, 9, 11, 12, 13, 14, 15, 16, 17, 18, 19: /mod_base = "2'-hydroxy corresponding base"
agggaagucuagggaggautt

SEQ ID NO: 1229 - DNA, 21 bp, artificial sequence
  siRNA reactive to human Eg5
  5'-terminal nucleic acid is a nucleoside, i.e. base + sugar but lacking 5'-phosphate
  modified_base 1, 3, 5, 6, 7, 8, 13, 14, 15, 17, 19: /mod_base = "2'-O-methyl corresponding base"
  modified_base 21: /mod_base = "5'-thio thymidine"
  modified_base 2, 4, 9, 10, 11, 12, 16, 18: /mod_base = "2'-hydroxy corresponding base"
cacacuccaagaccugugctt

SEQ ID NO: 1230 - DNA, 21 bp, artificial sequence
  siRNA reactive to human Eg5
  5'-terminal nucleic acid is a nucleoside, i.e. base + sugar but lacking 5'-phosphate
  modified_base 2, 4: /mod_base = "2'-O-methyl corresponding base"
  modified_base 21: /mod_base = "5'-thio thymidine"
  modified_base 1, 3, 5, 6, 7, 8, 9, 10, 11, 12, 13, 14, 15, 16, 17, 18, 19: /mod_base = "2'-hydroxy corresponding base"
gcacaggucuuggagugugtt

SEQ ID NO: 1231 - DNA, 21 bp, artificial sequence
  siRNA reactive to human Eg5
  5'-terminal nucleic acid is a nucleoside, i.e. base + sugar but lacking 5'-phosphate
  modified_base 2, 11, 13, 15, 17: /mod_base = "2'-O-methyl corresponding base"
  modified_base 21: /mod_base = "5'-thio thymidine"
  modified_base 1, 3, 4, 5, 6, 7, 8, 9, 10, 12, 14, 16, 18, 19: /mod_base = "2'-hydroxy corresponding base"
acagaaggaauauguacaatt

SEQ ID NO: 1232 - DNA, 21 bp, artificial sequence
  siRNA reactive to human Eg5
  5'-terminal nucleic acid is a nucleoside, i.e. base + sugar but lacking 5'-phosphate
  modified_base 4, 6, 8: /mod_base = "2'-O-methyl corresponding base"
  modified_base 21: /mod_base = "5'-thio thymidine"
  modified_base 1, 2, 3, 5, 7, 9, 10, 11, 12, 13, 14, 15, 16, 17, 18, 19: /mod_base = "2'-hydroxy corresponding base"
uuguacauauuccuucugutt

SEQ ID NO: 1233 - DNA, 21 bp, artificial sequence
  siRNA reactive to human Eg5
  5'-terminal nucleic acid is a nucleoside, i.e. base + sugar but lacking 5'-phosphate
  modified_base 1, 2, 8, 10, 11, 12, 15, 16, 17, 18: /mod_base = "2'-O-methyl corresponding base"
  modified_base 21: /mod_base = "5'-thio thymidine"
  modified_base 3, 4, 5, 6, 7, 9, 13, 14, 19: /mod_base = "2'-hydroxy corresponding base"
uuagagacaucugacuuugtt

SEQ ID NO: 1234 - DNA, 21 bp, artificial sequence
  siRNA reactive to human Eg5
  5'-terminal nucleic acid is a nucleoside, i.e. base + sugar but lacking 5'-phosphate
  modified_base 1, 7, 17: /mod_base = "2'-O-methyl corresponding base"
  modified_base 21: /mod_base = "5'-thio thymidine"
  modified_base 2, 3, 4, 5, 6, 8, 9, 10, 11, 12, 13, 14, 15, 16, 18, 19: /mod_base = "2'-hydroxy corresponding base"
caaagucagaugucucuaatt

SEQ ID NO: 1235 - DNA, 21 bp, artificial sequence
  siRNA reactive to human Eg5
  5'-terminal nucleic acid is a nucleoside, i.e. base + sugar but lacking 5'-phosphate
  modified_base 3, 4, 7, 8, 9, 10, 12, 17, 18: /mod_base = "2'-O-methyl corresponding base"
  modified_base 21: /mod_base = "5'-thio thymidine"
  modified_base 1, 2, 5, 6, 11, 13, 14, 15, 16, 19: /mod_base = "2'-hydroxy corresponding base"
aauugaucucguagaauuatt

SEQ ID NO: 1236 - DNA, 21 bp, artificial sequence
  siRNA reactive to human Eg5
  5'-terminal nucleic acid is a nucleoside, i.e. base + sugar but lacking 5'-phosphate
  modified_base 1, 7, 15: /mod_base = "2'-O-methyl corresponding base"
  modified_base 21: /mod_base = "5'-thio thymidine"
  modified_base 2, 3, 4, 5, 6, 8, 9, 10, 11, 12, 13, 14, 16, 17, 18, 19: /mod_base = "2'-hydroxy corresponding base"
uaauucuacgagaucaauutt

We claim:

1. A double-stranded ribonucleic acid (dsRNA) for inhibiting the expression of a human Eg5 gene in a cell, wherein said dsRNA comprises at least two sequences that are complementary to each other and wherein a sense strand comprises a first sequence an an antisense strand comprises a second sequence comprising a region of complementarity which is substantially complementary to at least a part of a mRNA encoding Eg5, and wherein said region of complementarity is less than 30 nucleotides in length and wherein said dsRNA, upon contact with a cell expressing said Eg5, inhibits expression of said Eg5 gene.

2. The dsRNA of claim 1, wherein said first sequence is selected from the group consisting of the antisense strand sequences Tables 1-3 and said second sequence is selected from the group consisting of the sense strand sequence of Tables 1-3.

3. The dsRNA of claim 1, wherein said dsRNA comprises at least one modified nucleotide.

4. The dsRNA of claim 2, wherein said dsRNA comprises at least one modified nucleotide.

5. The dsRNA of claim 4, wherein said modified nucleotide is chosen from the group of: a 2′-O-methyl modified nucleotide, a nucleotide comprising a 5′-phosphorothioate group, and a terminal nucleotide linked to a cholesteryl derivative or dodecanoic acid bisdecylamide group.

6. The dsRNA of claim 4, wherein said modified nucleotide is chosen from the group of: a 2′-deoxy-2′-fluoro modified nucleotide, a 2′-deoxy-modified nucleotide, a locked nucleotide, an abasic nucleotide, 2′-amino-modified nucleotide, 2′-alkyl-modified nucleotide, morpholino nucleotide, a phosphoramidate, and a non-natural base comprising nucleotide.

7. The dsRNA of claim 4, wherein said first sequence is selected from the group consisting of Tables 1-3 and said second sequence is selected from the group consisting of Tables 1-3.

8. A cell comprising the dsRNA of claim 1.

9. A pharmaceutical composition for inhibiting the expression of the Eg5 gene comprising the dsRNA of claim 2.

10. The pharmaceutical composition of claim 9, wherein said first sequence of said dsRNA is selected from the group consisting of sense strand sequences of Tables 1-3 and said second sequence of said dsRNA is selected from the group consisting of the antisense strand sequences of Tables 1-3.

11. The pharmaceutical composition of claim 10 further comprising a dsRNA that inhibits the expression of the VEGF gene.

12. A method for inhibiting the expression of the Eg5 gene in a cell, the method comprising:
(a) introducing into the cell the dsRNA of claim 2; and
(b) maintaining the cell produced in step (a) for a time sufficient to obtain degradation of the mRNA transcript of the Eg5 gene, thereby inhibiting expression of the Eg5 gene in the cell.

13. The method of claim 12, wherein a second dsRNA that inhibits the expression of VEGF is introduced into said cell.

14. A method of treating, preventing or managing pathological processes mediated by Eg5 expression comprising administering to a patient in need of such treatment, prevention or management a therapeutically or prophylactically effective amount of the dsRNA of claim 2.

15. The method of claim 14 further comprises administering a second dsRNA that inhibits the expression of VEGF.

16. A vector for inhibiting the expression of the Eg5 gene in a cell, said vector comprising a regulatory sequence operably linked to a nucleotide sequence that encodes at least one strand of a dsRNA, wherein one of the strands of said dsRNA is substantially complementary to at least a part of a mRNA encoding Eg5 and wherein said dsRNA is less than 30 base pairs in length an wherein said dsRNA, upon contact with a cell expressing said Eg5, inhibits the expression of said Eg5 gene by at least 40%.

17. A cell comprising the vector of claim 16.
